(19) United States
(12) Patent Application Publication
(10) Pub. No.: US 2013/0129723 A1
(43) Pub. Date: May 23, 2013

(54) Heterodimer Binding Proteins and Uses Thereof

(71) Applicants: John W. Blankenship, Seattle, WA (US); Philip Tan, Edmonds, WA (US)

(72) Inventors: John W. Blankenship, Seattle, WA (US); Philip Tan, Edmonds, WA (US)

(73) Assignee: Emergent Product Development Seattle, LLC, Seattle, WA (US)

(21) Appl. No.: 13/519,727

(22) PCT Filed: Dec. 29, 2010
(86) PCT No.: PCT/US10/62436

§ 371 Date: Dec. 10, 2012

Related U.S. Application Data
(60) Provisional application No. 61/290,840, filed on Dec. 29, 2009.
(60) Provisional application No. 61/335,266, filed on Jan. 4, 2010.
(60) Provisional application No. 61/366,743, filed on Jul. 22, 2010.

(51) Int. Cl. C07K 16/44

(52) U.S. Cl. CPC C07K 16/44
USPC 424/134.1; 530/387.3; 435/328; 435/69.6

(57) ABSTRACT

The present disclosure provides polypeptide heterodimers formed between two different single chain fusion polypeptides via natural heterodimerization of an immunoglobulin CH1 region and an immunoglobulin light chain constant region (CL). The polypeptide heterodimer comprises two or more binding domains that specifically bind one or more targets (e.g., a receptor). In addition, both chains of the heterodimer further comprise an Fc region portion. The present disclosure also provides nucleic acids, vectors, host cells and methods for making polypeptide heterodimers as well as methods for using such polypeptide heterodimers, such as in directing T cell activation, inhibiting solid malignancy growth, and treating autoimmune or inflammatory conditions.

### CROSS-REFERENCE(S) TO RELATED APPLICATION(S)

[0001] This application claims the benefit under 35 U.S.C. §119(e) of U.S. Provisional Patent Application No. 61/290,840, filed Dec. 29, 2009, and U.S. Provisional Patent Application No. 61/365,266, filed Jul. 16, 2010, each of which is herein incorporated by reference in its entirety.

### STATEMENT REGARDING SEQUENCE LISTING

[0002] The Sequence Listing associated with this application is provided in text format in lieu of a paper copy, and is hereby incorporated by reference into the specification. The name of the text file containing the Sequence Listing is 910180_{—}422PC_SEQUENCE_LISTING.txt. The text file is 839 KB, was created on Dec. 29, 2010, and is being submitted electronically via EFS-Web, concurrent with the filing of the specification.

### BACKGROUND

[0003] 1. Technical Field

[0004] The present disclosure generally provides polypeptide heterodimers, compositions thereof, and methods for making and using such polypeptide heterodimers. More specifically, the polypeptide heterodimers provided herein are formed, in part, via natural heterodimerization between an immunoglobulin CH1 region and an immunoglobulin light chain constant region (CL). In addition, the polypeptide heterodimers provided herein comprise two or more binding domains that specifically bind one or more targets. Furthermore, both single chain polypeptides of the polypeptide heterodimers provided herein each comprise an Fc region portion (e.g., immunoglobulin CH2 and CH3 domains).

[0005] 2. Description of the Related Art

[0006] The process of signal transduction often involves receptor proteins that have extracellular domains, transmembrane domains, and intracellular domains. During ligand binding, cell surface receptor molecules often oligomerize or multimerize (also referred to as “cross-link”) to effectively transmit a signal to the intracellular compartment of the cell. The stimulation or blockade of this interaction between a receptor and a ligand or of the subsequent oligomerization or multimerization of receptors has important therapeutic implications for a wide variety of diseases.

[0007] Exemplary molecules useful in modulating receptor and ligand interactions include antibodies or molecules derived from antibodies. For instance, an antibody or its derivative may function as a receptor antagonist that binds to a cell surface receptor and inactivates it by blocking the binding site of an activating ligand or preventing receptor dimerization or multimerization required for activation. In certain other cases, an antibody or its derivative may function as an agonist by binding to and cross-linking multiple membrane receptors, mimicking the function of a natural ligand. Another example is a bispecific antibody derivative that may be used to direct cytotoxic agents or immune effector cells to target sites, such as tumors.

[0008] Bispecific antibodies are antibody-based molecules that can simultaneously bind two separate and distinct antigens (or different epitopes of the same antigen). One use of bispecific antibodies has been to redirect cytotoxic immune effector cells for enhanced killing of tumor cells by antibody dependent cellular cytotoxicity (ADCC). In this context, one arm of the bispecific antibody binds an antigen on the tumor cell, and the other binds a determinant expressed on effector cells. By cross-linking tumor and effector cells, the bispecific antibody not only brings the effector cells within the proximity of the tumor cells but also simultaneously triggers their activation, leading to effective tumor cell-killing. Bispecific antibodies have also been used to enrich chemo- or radiotherapeutic agents in tumor tissues to minimize detrimental effects to normal tissue. In this setting, one arm of the bispecific antibody binds an antigen expressed on the cell targeted for destruction, and the other arm delivers a chemotherapeutic drug, radioisotope, or toxin.

[0009] A major obstacle in the general development of bispecific antibodies has been the difficulty of producing materials of sufficient quality and quantity for both preclinical and clinical studies. Initially, the main route to the production of bispecific antibodies was by co-expression of both the light chains and both the heavy chains of two parent antibodies of different specificities in a single cell. However, the desired binding-competent bispecific antibodies are a minor product, and purification from the other products is very difficult. Another traditional method for bispecific antibody production is chemical conjugation of two antibodies or their fragments having different specificities. However, this method is also complicated, and the chemical modification process may inactivate the antibody or promote aggregation. Because purification from undesired products remains difficult, the resulting low yield and poor quality of bispecific antibody make this process unsuitable for the large scale production required for clinical development.

[0010] Recently, various heterodimerization techniques have been used to improve the production of bispecific antibodies. However, fusion of simple heterodimerization domains like the Jun/Fos coiled-coil to scFv domains lead to a mixture of homo- and heterodimers and need to be assembled by refolding (de Kruif and Logtenberg, J. Biol. Chem. 271: 7630-4, 1996). Fusion of scFv fragments to whole antibodies was also used as a dimerization device (Coloma and Morrison, Nat. Biotechnol. 15:159-63, 1997). However, such fusion results in a large molecule with poor solid tissue penetration capabilities. Fusion of two scFv fragments together has also been used to generate bispecific proteins (e.g., BITE® antibodies by Micromet Inc., Bethesda, Md., U.S. Pat. No. 7,635,472). However, such proteins do not contain Fc regions, and thus do not allow manipulation of their activities via Fc regions. In addition, these proteins are small (˜55 kDa) and thus have relatively short half lives in serum.

[0011] To date, immunoglobulin fusion technology has not provided commercially viable heterodimeric proteins or methods for making them. Thus, there remains a need in the art for alternative multispecific heterodimeric proteins as well as efficient methods for producing the same.

### BRIEF SUMMARY

[0012] The present disclosure provides polypeptide heterodimers formed between two different single chain polypeptides via natural heterodimerization of an immunoglobulin CH1 region and an immunoglobulin light chain constant region (CL). The present disclosure also provides nucleic acids, vectors, host cells and methods for making polypeptide heterodimers as well as methods for using such polypeptide heterodimers, such as in directed T cell activation, inhibiting solid malignancy growth, treating autoimmune or inflammatory conditions, or treating B-cell associated disorders or diseases.

[0013] In one aspect, the present disclosure provides a polypeptide heterodimer that comprises (a) a first single chain polypeptide (SCP-I) comprising from one to four binding domains that specifically bind from one to four targets, a hinge (H-I), an immunoglobulin heterodimerization domain (HD-I), and an Fc region portion (FRP-I); and (b) a second single chain polypeptide (SCP-II) comprising from zero to four binding domains that specifically bind from zero to four targets, a hinge (H-II), an immunoglobulin heterodimerization domain (HD-II), and an Fc region portion (FRP-II); wherein (i) the immunoglobulin HD-I and the immunoglobulin HD-II preferentially associate with each other to form a polypeptide heterodimer comprised of SCP-I and SCP-II, and (1) the immunoglobulin heterodimerization domain of the first single chain polypeptide (HD-I) comprises a first immunoglobulin CH1 region, and the immunoglobulin heterodimerization domain of the second single chain polypeptide (HD-II) comprises a first immunoglobulin CL region, or (2) the immunoglobulin heterodimerization domain of the first single chain polypeptide (HD-I) comprises a first immunoglobulin CL region, and the immunoglobulin heterodimerization domain of the second single chain polypeptide (HD-II) comprises a first immunoglobulin CH1 region; and (ii) the Fc region portion of SCP-I and the Fc region portion of SCP-II comprise an immunoglobulin CH2 and CH3 domain of IgG1, IgG2, IgG3, IgG4, IgA1, IgA2, IgD, or any combination thereof; one or two immunoglobulin CH3 domains of IgG1, IgG2, IgG3, IgG4, IgA1, IgA2, IgD, IgE, IgM, or any combination thereof; or an immunoglobulin CH3 and CH4 domain of IgE, IgM, or any combination thereof, provided that the polypeptide heterodimer comprises at least two binding domains that specifically bind a target, for instance, at least two different targets.

[0014] In certain embodiments, the binding domains of the polypeptide heterodimers are single chain Fv (scFv) polypeptides.

[0015] In certain embodiments, the polypeptide heterodimer comprises two binding domains (BD1 and BD2). In one embodiment, the two binding domains (BD1 and BD2) are both on the first single chain polypeptide (SCP-I) and wherein the HD-I and FRP-I are disposed between BD1 and BD2. In another embodiment, the first binding domain (BD1) is on the first single chain polypeptide (SCP-I) and the second binding domain (BD2) is on the second single chain polypeptide (SCP-II). For example, the first binding domain (BD1) may be amino terminal to the Fc region portion of the first single chain polypeptide (FRP-I), and the second binding domain (BD2) may amino terminal to the Fc region portion of the second single chain polypeptide (FRP-II). Alternatively, the first binding domain (BD1) may be amino terminal to the Fc region portion of the first single chain polypeptide (FRP-I), and the second binding domain (BD2) may be carboxyl terminal to the Fc region portion of the second single chain polypeptide (FRP-II). Also alternatively, the first binding domain (BD1) may be carboxyl terminal to the Fc region portion of the first single chain polypeptide (FRP-I), and the second binding domain (BD2) may be carboxyl terminal to the Fc region portion of the second single chain polypeptide (FRP-II).

[0016] In certain embodiments, the polypeptide heterodimer comprises three binding domains (BD1, BD2 and BD3). In one embodiment, the HD-I and FRP-I are disposed between BD1 and BD2, and the third binding domain (BD3) is amino terminal to the Fc region portion of the second single chain polypeptide (FRP-II). In an alternative embodiment, the HD-I and FRP-I are disposed between BD1 and BD2, and the third binding domain (BD3) is carboxyl terminal to the Fc region portion of the second single chain polypeptide (FRP-II).

[0017] In certain embodiments, the polypeptide heterodimer comprises four binding domains (BD1, BD2, BD3, and BD4). For instance, the HD-I and FRP-I may be disposed between BD1 and BD2, and the HD-II and FRP-II may be disposed between BD3 and BD4.

[0018] In certain embodiments, the polypeptide heterodimer comprises five to eight binding domains (e.g., 5, 6, 7 or 8 binding domains).

[0019] In certain embodiments, at least one of the binding domains of the polypeptide heterodimers provided herein specifically binds to, or is an antagonist of, TCRα, TCRβ, CD3γ, CD3δ, CD3ε, CD28, CD79b, hyperIL-6, monoIL-10, CD86, CD20, PSMA, CD19, HLA-DR, Ron, c-Met, CEACAM-6, LIGHT, GITRL, CD40, PDL1, PDL2, HVEM, LTBR, EGFR, EGFRvIII, ErbB2, ErbB3, ErbB4, IGF1R, EphA2, PDGFR, VEGFR1-4, Angiopoietin 2, CD64, CD32A, CD16, CD71, TNFR1, TNFR2, TWEAKR, TACI, BAFF-R, BCMA, FAS, CD32B, CD21, CD22, CD30, CD33, CD37, CD38, CD70, TNFα, IL-6, hyperIL-6, IL-2, IL-1, IL-7, IL-8, IL-17A/C, IP-10, IFNγ, IFNα, RANKL, FASL, TGFβ, IL10, IL17A/F, CSF2, IGF1, IGF2, BLyS/APRIL, HGF, MSP, EGF (including epiregulin, herregulin, β-regulin, neuregulin), HIF-1α, VEGFA, VEGFB, VEGFC, VEGFD, TNFα, Wnt, sHH, TGFβ, PDGF, TWEAK, EpCAM, CEA, PCTA-1, STEAP-1, PSCA, ALCAM (CD166), EphA2, CD151, CA-125, MUC-1, MAGE-1, TROP2, CCR5, HER-3, HER-4, EGFR, CEA, MUC2, MUC3, MUC4, MUC5_{AC}, MUC5_{b}, MUC7, βhCG, Lewis-Y, ganglioside GD3, 9-O-Acetyl-GD3, GM2, Globo H, fucosyl GM1, Poly SA, GD2, Carboanhydrase IX (MN/CA IX), CD44v6, Sonic Hedgehog (Shh), Wue-1, Plasma Cell Antigen, (membrane-bound) IgE, Melanoma Chondroitin Sulfate Proteoglycan (MCSP), CCR8, TNF-alpha precursor, STEAP, mesothelin, A33 Antigen, Prostate Stem Cell Antigen (PSCA), Ly-6; desmoglein 4, E-cadherin neoepitope, Fetal Acetylcholine Receptor, CD25, CA19-9 marker, CA-125 marker and Muellerian Inhibitory Substance (MIS) Receptor type II, sTn (sialylated Tn antigen; TAG-72), FAP (fibroblast activation antigen), endosialin, EGFRvIII, LG, SAS, CD63, IGF1R, CD151, TGFBR2, GHRHR, GHR, IL-6R, gp130, TNFR2, OSMRβ, Patched-1, Frizzled, Robo1, CD80, CD81, CD86, OX40, CD40, CD137, LIFRβ, TLR7 or TLR9.

[0020] In certain other embodiments, at least one of the binding domains of the polypeptide heterodimer is an agonist of IL-10, HLA-G, HGF, IL-35, PD-1, BTLA, TNFR1, TNFR2, DR4, DR5, TWEAKR, or FAS.

[0021] In certain polypeptide heterodimers provided herein, at least one binding domain specifically binds a TCR complex or a component thereof, and at least another binding domain specifically binds to PSMA, CD79b, CD19, HLA-DR, CD20, RON, c-Met, or CEACAM-6.

[0022] In certain other polypeptide heterodimers provided herein, at least one binding domain specifically binds to CD28, and at least another binding domain specifically binds to, or is an antagonist of, CD79b, hyperIL-6, PDL2, monoIL-10, CD86, LIGHT, GITRL, CD40, PDL1, HVEM, or LTBR.

[0023] In certain other polypeptide heterodimers provided herein, at least one binding domain specifically binds to CD28, and at least another binding domain is an agonist of IL-10, HLA-G, HGF, IL-35, PD-1, or BTLA.

[0024] In certain embodiments, the immunoglobulin heterodimerization domain of the first single chain polypeptide (HD-I) comprises the first immunoglobulin CH1 region and the immunoglobulin heterodimerization domain of the second single chain polypeptide (HD-II) comprises the first immunoglobulin CL region. In one embodiment, the first CH1 region is amino terminal to the Fc region portion of the first single chain polypeptide, and the first CL region is amino terminal to the Fc region portion of the second single chain polypeptide. In another embodiment, the first CH1 region is carboxyl terminal to the Fc region portion of the first single chain polypeptide, and the first CL region is carboxyl terminal to the Fc region portion of the second single chain polypeptide.

[0025] In certain embodiments in which the immunoglobulin heterodimerization domain of the first single chain polypeptide (HD-I) comprises the first immunoglobulin CH1 region and the immunoglobulin heterodimerization domain of the second single chain polypeptide (HD-II) comprises the first immunoglobulin CL region, the first single chain polypeptide further comprises a second CH1 region and the second single chain polypeptide further comprises a second CL region, and the second CH1 region of the first single chain polypeptide and the second CL region of the second single chain polypeptide associate with each other in the polypeptide heterodimer. For instance, the Fc region portion of the first single chain polypeptide may be disposed between the first and second CH1 regions, and the Fc region portion of the second single chain polypeptide may be disposed between the first and second CL regions. Alternatively, both the first and second CH1 regions may be amino terminal to the Fc region portion of the first single chain polypeptide, and both the first and second CL regions may be amino terminal to the Fc region portion of the second single chain polypeptide. Also alternatively, both the first and second CH1 regions may be carboxyl terminal to the Fc region portion of the first single chain polypeptide, and both the first and second CL regions may be carboxyl terminal to the Fc region portion of the second single chain polypeptide.

[0026] In certain other embodiments in which the immunoglobulin heterodimerization domain of the first single chain polypeptide (HD-I) comprises the first immunoglobulin CH1 region and the immunoglobulin heterodimerization domain of the second single chain polypeptide (HD-II) comprises the first immunoglobulin CL region, the first single chain polypeptide further comprises a second CL region and the second single chain polypeptide further comprises a second CH1 region, and the second CL region of the first single chain polypeptide and the second CH1 region of the second single chain polypeptide associate with each other in the polypeptide heterodimer. For instance, in one embodiment, in the first single chain polypeptide, the first CH1 region is amino terminal to the Fc region portion and the second CL region is carboxyl terminal to the Fc region portion; and in the second single chain polypeptide, the first CL region is amino terminal to the Fc region portion, and the second CH1 region is carboxyl terminal to the Fc region portion. In another embodiment, in the first single chain polypeptide, the first CH1 region is carboxyl terminal to the Fc region portion, and the second CL region is amino terminal to the Fc region portion; and in the second single chain polypeptide, the first CL region is carboxyl terminal to the Fc region portion, and the second CH1 region is amino terminal to the Fc region portion. In yet another embodiment, in the first single chain polypeptide, both the first CH1 region and the second CL regions are amino terminal to the Fc region portion, and the first CH1 region is amino terminal to the second CL region; and in the second single chain polypeptide, both the first CL region and the second CH1 region are amino terminal to the Fc region portion, and the first CL region is amino terminal to the second CH1 region. In yet another embodiment, in the first single chain polypeptide, both the first CH1 region and the second CL regions are amino terminal to the Fc region portion, and the second CL region is amino terminal to the first CH1 region; and in the second single chain polypeptide, both the first CL region and the second CH1 region are amino terminal to the Fc region portion, and the second CH1 region is amino terminal to the first CL region. In a further embodiment, in the first single chain polypeptide, both the first CH1 region and the second CL regions are carboxyl terminal to the Fc region portion, and the first CH1 region is amino terminal to the second CL region; and in the second single chain polypeptide, both the first CL region and the second CH1 region are carboxyl terminal to the Fc region portion, and the first CL region is amino terminal to the second CH1 region. In another embodiment, in the first single chain polypeptide, both the first CH1 region and the second CL regions are carboxyl terminal to the Fc region portion, and the second CL region is amino terminal to the first CH1 region; and in the second single chain polypeptide, both the first CL region and the second CH1 region are carboxyl terminal to the Fc region portion, and the second CH1 region is amino terminal to the first CL region.

[0027] In certain embodiments, the immunoglobulin heterodimerization domain of the first single chain polypeptide (HD-I) comprises a first immunoglobulin CL region, and the immunoglobulin heterodimerization domain of the second single chain polypeptide (HD-II) comprises a first immunoglobulin CH1 region. In one embodiment, the first CL region is amino terminal to the Fc region portion of the first single chain polypeptide, and the first CH1 region is amino terminal to the Fc region portion of the second single chain polypeptide. In another embodiment, the first CL region is carboxyl terminal to the Fc region portion of the first single chain polypeptide, and the first CH1 region is carboxyl terminal to the Fc region portion of the second single chain polypeptide. In yet another embodiment, the first single chain polypeptide further comprises a second CL region and the second single chain polypeptide further comprises a second CH1 region, and the second CL region of the first single chain polypeptide and the second CH1 region of the second single chain polypeptide associate with each other in the polypeptide heterodimer. For instance, the Fc region portion of the first single chain polypeptide may be disposed between the first and second CL regions, and the Fc region portion of the second single chain polypeptide may be disposed between the first and second CH1 regions. Alternatively, both the first and second CL regions may be amino terminal to the Fc region portion of the first single chain polypeptide, and both the first and second CH1 regions may be amino terminal to the Fc region portion of the second single chain polypeptide. Also alternatively, both the first and second CL regions may be carboxyl terminal to the Fc region portion of the first single chain polypeptide, and both the first and second CH1 regions may be carboxyl terminal to the Fc region portion of the second single chain polypeptide.

[0028] In certain embodiments, the first CL region is a Cκ region. In other embodiments, the first CL region is a Cλ region.

[0029] In certain embodiments, the second CL region is a Cκ region. In other embodiments, the second CL region is a Cλ region.

[0030] In certain embodiments, the Cκ region is a wild type human immunoglobulin Cκ region. In certain other embodiments, the Cκ region is an altered human immunoglobulin Cκ region with one or more amino acids of a wild type human Cκ region substituted at N29, N30, Q52, V55, T56, T56, S68, or T70. For example, the one or more amino acid substitutions may be selected from Ala (A), Arg (R), Trp (W), Tyr (Y), Glu (E), Gln (Q), Lys (K), Asp (D), Met (M), Ser (S), and Phe (F).

[0031] In certain embodiments, the CH1 region is an altered human immunoglobulin CH1 region comprising an amino acid substitution by which Val (V) at position 68 is substituted by Lys (K), Arg (R) or His (H), and wherein the Ck region is an altered human immunoglobulin Ck region comprising an amino acid substitution by which Leu (L) at position 29 is substituted by Asp (D) or Glu (E). In certain other embodiments, the CH1 region is an altered human immunoglobulin CH1 region comprising an amino acid substitution by which Val (V) at position 68 is changed to Asp (D) or Glu (E), and wherein the Ck region is an altered human immunoglobulin Ck region comprising an amino acid substitution by which Leu (L) at position 29 is changed to Lys (K), Arg (R) or His (H).

[0032] In certain embodiments, the Cλ region is a wild type human immunoglobulin Cλ region.

[0033] In certain embodiments, the first CH1 region or the second CH1 region when present is a wild type human immunoglobulin CH1 region, such as a wild type human IgG1 CH1 region.

[0034] In certain embodiments, the first CH1 region or the second CH1 region when present is an altered human immunoglobulin CH1 region, such as an altered human IgG1 CH1 region, with the cysteine of a wild type human immunoglobulin CH1 region that is involved in forming a disulfide bond with a wild type human immunoglobulin CL region deleted or substituted.

[0035] In certain embodiments, the Cκ region is an altered human immunoglobulin Ck region, such as an with the cysteine residue of a wild type human Cκ region that is involved in forming a disulfide bond with a wild type human immunoglobulin CH1 region deleted or substituted.

[0036] In certain embodiments, the Cλ region is an altered human immunoglobulin Cλ region with the cysteine residue of a wild type human Cλ region that is involved in forming a disulfide bond with a wild type human immunoglobulin CH1 region deleted or substituted.

[0037] In certain embodiments, the first CH1 region and the second CH1 region when present is a polypeptide comprising SEQ ID NO:114, 844 or 845.

[0038] In certain embodiments, the Ck region when present is selected from any one of the polypeptides comprising SEQ ID NOS:141-178, 202, and 838-843.

[0039] In certain embodiments, the Cλ region when present is a polypeptide comprising SEQ ID NO:140.

[0040] In certain embodiments, the Fc region portion of the first single chain polypeptide (FRP-I) and the Fc region portion of the second single chain polypeptide (FRP-II) each comprise an immunoglobulin CH2 domain, such as an IgG1 CH2 domain or an IgG2, IgG3, IgG4, IgA1, IgA2, or IgD CH2 domain.

[0041] In certain embodiments, the Fc region portion of the first single chain polypeptide (FRP-I) and the Fc region portion of the second single chain polypeptide (FRP-II) each comprise an immunoglobulin CH3 domain, such as an IgG1 CH3 domain or an IgG2, IgG3, IgG4, IgA1, IgA2, IgD, IgE or IgM CH3 domain.

[0042] In certain embodiments, the Fc region portion of the first single chain polypeptide (FRP-I) and the Fc region portion of the second single chain polypeptide (FRP-II) each comprise an immunoglobulin CH2 domain and an immunoglobulin CH3 domain, such as are IgG1, IgG2, IgG3, IgG4, IgA1, IgA2, or IgD CH2 and CH3 domains.

[0043] In some embodiments in which the Fc region portion comprises an immunoglobulin CH3 domain that is immediately amino terminal to an immunoglobulin heterodimerization domain (e.g., a CH1 domain or a Ck domain), the immunoglobulin CH3 domain is linked to the CH1 domain immediately carboxyl terminal to the immunoglobulin CH3 domain in one single chain polypeptide via a peptide comprising SEQ ID NOS:846, 847, 848, or 849; and the immunoglobulin CH3 domain is linked to the Ck domain immediately carboxyl terminal to the immunoglobulin CH3 domain in the other single chain polypeptide via a peptide comprising SEQ ID NOs:846, 850, 951, or 852.

[0044] In certain embodiments, the Fc region portion of the first single chain polypeptide (FRP-I) and the Fc region portion of the second chain polypeptide (FRP-II) comprise IgM or IgE CH3 and CH4 domains.

[0045] In certain embodiments in which the Fc region portion comprises an immunoglobulin CH2 domain, the CH2 domain may be an altered human IgG1, IgG2, IgG3, or IgG4 CH2 domain. Exemplary altered human IgG1, IgG2, IgG3 or IgG4 CH2 domain include those that comprise (a) an amino acid substitution at position 297 and at least one additional substitution or deletion at positions 234 to 238; (b) one or more amino acid mutations at positions 234-238 and at least one substitution at position 253, 310, 318, 320, 322, or 331; or (c) an amino acid substitution at the asparagine of position 297, one or more substitutions or deletions at positions 234 to 238, and at least one substitution at position 253, 310, 318, 320, 322, or 331. Another exemplary CH2 domain is an altered human IgG1 CH2 domain that comprises amino acid substitutions at positions L234, L235, G237, E318, K320 and K322.

[0046] In certain embodiments, the CH3 domain of the first single chain polypeptide is an altered human IgG1, IgG2, IgG3, or IgG4 CH3 domain that comprises a T366W, and the CH3 domain of the second single chain polypeptide is an altered human IgG1, IgG2, IgG3 or IgG4 CH3 domain that comprises a Y407A substitution. In certain other embodiments, the CH3 domain of the first single chain polypeptide is an altered human IgG1, IgG2, IgG3, or IgG4 CH3 domain that comprises a T366Y substitution, and the CH3 domain of the second single chain polypeptide is an altered human IgG1, IgG2, IgG3 or IgG4 CH3 domain that comprises a Y407T substitution. In certain other embodiments, the CH3 domain of the first single chain polypeptide is an altered human IgG1, IgG2, IgG3, or IgG4 CH3 domain that comprises a T366W substitution, and the CH3 domain of the second single chain polypeptide is an altered human IgG1, IgG2, IgG3 or IgG4 CH3 domain that comprises T366S, L368A and Y407V substitutions. In certain other embodiments, the CH3 domain of the first single chain polypeptide is an altered human IgG1, IgG2, IgG3, or IgG4 CH3 domain that comprises a Y407A substitution, and the CH3 domain of the second single chain polypeptide is an altered human IgG1, IgG2, IgG3 or IgG4 CH3 domain that comprises a T366W substitution. In certain other embodiments, the CH3 domain of the first single chain polypeptide is an altered human IgG1, IgG2, IgG3, or IgG4 CH3 domain that comprises a Y407T substitution, and the CH3 domain of the second single chain polypeptide is an altered human IgG1, IgG2, IgG3 or IgG4 CH3 domain that comprises a T366Y substitution. In certain other embodiments, the CH3 domain of the first single chain polypeptide is an altered human IgG1, IgG2, IgG3, or IgG4 CH3 domain that comprises T366S, L368A and Y407W substitutions, and the CH3 domain of the second single chain polypeptide is an altered human IgG1, IgG2, IgG3 or IgG4 CH3 domain that comprises a T366W substitution.

[0047] In certain embodiments, the hinge of both the first and second single chain polypeptides is an immunoglobulin hinge region, such as an IgG1, IgG2, IgG3, IgG4, IgA1, IgA2, IgD, or IgE hinge. In certain embodiments, the immunoglobulin hinge is a wild type immunoglobulin hinge. In certain other embodiments, the immunoglobulin hinge is an altered immunoglobulin hinge selected from SEQ ID NOS:232, 234, 240, 664-673, 675 and 676.

[0048] In certain embodiments, the hinge region is (a) at the amino terminal to the Fc region portion, (b) disposed between the binding domain and the immunoglobulin heterodimerization domain, (c) disposed between the immunoglobulin heterodimerization domain and the Fc region portion, (d) at the amino terminus of the first or second single chain polypeptide, (e) disposed between the Fc region portion and a binding domain, or (f) at the carboxyl terminus of the first or second single chain polypeptide.

[0049] In certain embodiments, at least one of the first and second single chain polypeptide hinges is a C-type lectin hinge region, such as an NKg2A or NKg2D peptide, or a derivative thereof.

[0050] In certain embodiments, the hinges of the first and second single chain polypeptides are identical. In certain other embodiments, the hinges of the first and second single chain polypeptides are different.

[0051] In certain embodiments, the first single chain polypeptide comprises a binding domain that specifically binds a TCR complex or a component thereof, and the second single chain polypeptide comprises a binding domain that specifically binds CD19, CD79b, HLA-DR or CD20.

[0052] In certain embodiments, the first single chain polypeptide comprises a binding domain that specifically binds CD28, and the second single chain polypeptide comprises a binding domain (a) that specifically binds CD79b, hyperIL-6, or CD86 or (b) that comprises a PDL ectodomain or a monoIL-10.

[0053] In certain embodiments, the first single chain polypeptide comprises a binding domain that specifically binds c-Met, and the second single chain polypeptide comprises a binding domain that specifically binds RON.

[0054] In certain embodiments, the first and second single chain polypeptides comprise SEQ ID NOS: SEQ ID NOS:2 and 4, SEQ ID NOS:6 and 8, SEQ ID NOS:10 and 12, SEQ ID NOS:14 and 16, SEQ ID NOS:18 and 20, SEQ ID NOS:20 and 22, SEQ ID NOS:20 and 24, SEQ ID NOS:30 and 32, SEQ ID NOS:29 and 31, SEQ ID NOS:29 and 32, SEQ ID NOS:30 and 72, SEQ ID NOS:53 and 72, SEQ ID NOS:54 and 72, SEQ ID NOS:55 and 72, SEQ ID NOS:70 and 72, SEQ ID NOS:71 and 72, SEQ ID NOS:63 and 56, SEQ ID NOS:64 and 57, SEQ ID NOS:65 and 60, SEQ ID NOS:66 and 58, SEQ ID NOS:67 and 59, SEQ ID NOS:68 and 61, SEQ ID NOS:69 and 62, SEQ ID NOS:54 and 811, SEQ ID NOS:54 and 812, SEQ ID NOS:54 and 813, SEQ ID NOS:814 and 818, SEQ ID NOS:815 and 818, SEQ ID NOS:816 and 818, SEQ ID NOS:817 and 818, SEQ ID NOS:814 and 820, SEQ ID NOS:814 and 821, SEQ ID NOS:54 and 819, SEQ ID NOS:814 and 826, SEQ ID NOS:814 and 822, SEQ ID NOS:814 and 823, SEQ ID NOS:814 and 824, SEQ ID NOS:859 and 862, SEQ ID NOS:860 and 863, SEQ ID NOS:861 and 864, SEQ ID NOS:874 and 825, SEQ ID NOS:875 and 879, SEQ ID NOS:876 and 880, SEQ ID NOS:877 and 881, or SEQ ID NOS:878 and 882.

[0055] In another aspect, the present disclosure provides a composition comprising a polypeptide heterodimer provided herein and a pharmaceutically acceptable excipient.

[0056] In another aspect, the present disclosure provides an expression vector capable of expressing a polypeptide heterodimer provided herein, comprising a first polynucleotide encoding the first single chain polypeptide and a second polynucleotide encoding the second single chain polypeptide.

[0057] In another aspect, the present disclosure provides a host cell comprising the above expression vector.

[0058] In another aspect, the present disclosure provides a host cell comprising first and second expression vectors capable of expressing the first and second single chain polypeptides, respectively, of the polypeptide heterodimer provided herein.

[0059] In another aspect, the present disclosure provides a method for making a polypeptide heterodimer, comprising (a) culturing a host cell provided herein under conditions suitable to express first and second single chain polypeptides, and (b) optionally isolating or purifying the heterodimers formed from the first and second single chain polypeptides from the culture.

[0060] In another aspect, the present disclosure provides a method for directing T cell activation, comprising administering to a patient in need thereof an effective amount of a polypeptide heterodimer that comprises a binding domain that specifically binds TCRα, TCRβ, CD3γ, CD3δ, CD3ε, or a combination thereof, and a second binding domain that specifically binds a different target, for instance, a tumor-specific antigen or other antigen of choice at a site or cell where T cell activation is desired.

[0061] In another aspect, the present disclosure provides a method for inhibiting growth, metastatis, or metastatic growth of a malignancy, comprising administering to a patient in need thereof an effective amount of a polypeptide heterodimer that comprises a binding domain that specifically binds TCRα, TCRβ, CD3γ, CD3δ, CD3ε, c-Met, RON, or a combination thereof. In certain embodiments, the method further comprises administering to a patient in need thereof a chemotherapeutic agent or ionizing radiation.

[0062] In another aspect, the present disclosure provides a method for treating an autoimmune or inflammatory condition, comprising administering to a patient in need thereof an effective amount of a polypeptide heterodimer that comprises a binding domain that specifically binds TCRα, TCRβ, CD3γ, CD3δ, CD3ε, or CD28.

[0063] In another aspect, the present disclosure provides a method for treating a B-cell associated disorder or disease comprising administering to a patient in need thereof an effective amount of a polypeptide heterodimer that comprises a binding domain that specifically binds TCRα, TCRβ, CD3γ, CD3δ, or CD3ε, and a second binding domain that specifically binds to CD19, CD20, CD79b or HLA-DR.

[0064] In certain embodiments, the methods for using the polypeptide heterodimers provided herein may further comprise administering to a patient in need thereof a second active agent, such as a second polypeptide heterodimer, a monoclonal antibody, or an immunoglobulin-derived fusion protein.

### BRIEF DESCRIPTION OF THE DRAWINGS

[0065] FIG. 1 is a schematic representation of bivalent anti-CD28 polypeptide heterodimer X0172 (left) and SDS-PAGE analysis of X0172 (right). “NR” stands for “Non-Reduced,” and “Red” stands for “Reduced.”

[0066] FIG. 2 shows that both a monovalent (X0124) and a bivalent (X0172) anti-CD28 polypeptide heterodimer synergize with a suboptimal concentration of PMA in stimulating purified human T cells when compared to an anti-CD28 scFv (2E12 scFv) but less than a bivalent anti-CD28 SMIP protein (2E12 SMIP).

[0067] FIG. 3 shows that bivalent polypeptide heterodimer X0172 binds to CD4 T cells better than 2E12 scFv and monovalent polypeptide heterodimer X0124.

[0068] FIG. 4 shows cation exchange chromatography of polypeptide heterodimers X0251, X0252 and X0253 (left) and SDS-PAGE electrophoresis analysis of the same polypeptide heterodimers under non-reduced (NR) and reduced (Red) conditions (right).

[0069] FIG. 5 shows the mass spectra of polypeptide heterodimer X0252, which demonstrates that the heterodimer is the predominant species.

[0070] FIG. 6 shows SDS-PAGE electrophoresis analysis of polypeptide heterodimers X0283 and X0284 under non-reduced (NR) and reduced (Red) conditions (left) and cation exchange chromatography analysis of polypeptide heterodimer X0283.

[0071] FIG. 7 shows direct binding to CD86 by polypeptide heterodimer X0283 as examined by BIACORE® analysis, with response units (Ru) plotted against time (left) and a schematic representation of X0283.

[0072] FIGS. 8A and 8B show binding of bispecific anti-RON and anti-CD3 constructs (polypeptide heterodimer S0268 and Scorpion protein S0266) to MDA-MB-453 cells (A) and to isolated T cells (B).

[0073] FIGS. 9A and 9B show specificity of binding to (A) Rec1 (CD19⁺, CD20⁺) cells or (B) Jurkat (CD3⁺) cells by bispecific heterodimers having either anti-CD19 and anti-CD3 binding domains (TSC020) or having anti-CD20 and anti-CD3 binding domains (TSC021).

[0074] FIGS. 10A-10D show proliferation of CD4+ and CD8+ T-cells in response to bispecific polypeptide heterodimers TSC054, TSC078, TSC079, and bsc19×3 (TSC036) with (A and B) Daudi (CD19⁺) cells or (C and D) MDA-MB-453 (CD19⁻) cells.

[0075] FIGS. 11A and 11B shows T-cell directed cytotoxicity induced by bispecific polypeptide heterodimers TSC054, TSC078, TSC079, and S0268 in a chromium (⁵¹Cr) release assay with (A) Daudi (RON⁻, CD19⁺) cells or (B) BxPC-3 (RON⁺, CD19⁻) cells.

[0076] FIG. 12 shows target-dependent T-cell proliferation induced by a CD19+ cell line (Daudi) using bispecific polypeptide heterodimers TSC165, TSC166, TSC167, TSC168 and TSC100 at concentrations from 0.1 pM to 10000 pM.

[0077] FIG. 13 shows target-dependent T-cell proliferation induced by a CD19+ cell line (Daudi) using bispecific polypeptide heterodimers TSC127 and TS165 with bsc19×3 BiTE as a control at concentrations from 0.001 pM to 1000 pM.

[0078] FIG. 14 shows target-dependent redirected T-cell cytotoxicity on a CD19+ cell line (Daudi) using bispecific polypeptide heterodimers TSC100, TSC165, TC166, TSC167, and TSC168.

### DETAILED DESCRIPTION

[0079] The present disclosure provides polypeptide heterodimers formed between two different single chain polypeptides via natural heterodimerization of an immunoglobulin CH1 region and an immunoglobulin light chain constant region (CL). The polypeptide heterodimer has two or more binding domains that specifically bind one or more targets (e.g., an antigen, a receptor, or a ligand). In addition, both chains of a heterodimer each further comprise an Fc region portion (e.g., immunoglobulin CH2 and/or CH3 domains). The present disclosure also provides nucleic acids, vectors, host cells and methods for making polypeptide heterodimers.

[0080] The heterodimerization technology described herein has one or more of the following advantages: (1) potential for minimal immunogenicity of the polypeptide heterodimers because the dimers are formed via natural heterodimerization of an immunoglobulin CH1 region and an immunoglobulin CL region; (2) efficient production and purification of polypeptide heterodimers of the present disclosure is possible by co-expressing the two different single chain polypeptides, as shown in the examples; (3) the ability to mediate Fc effector functions (e.g., CDC, ADCC, ADCP), which can be modulated up or down by mutagenesis, and a longer serum half life because each chain of a polypeptide heterodimer according to the present disclosure has an Fc region portion (e.g., immunoglobulin CH2 and CH3 domains); and (4) polypeptide heterodimers of the present disclosure have a size that is typically smaller than an antibody molecule, which can allow for better tissue penetration, such as into a solid malignancy.

[0081] The polypeptide heterodimers provided herein are useful to direct therapeutic agents or immune effector cells to target cells. For instance, in certain embodiments, the polypeptide heterodimers may comprise a binding domain that specifically binds a TCR complex or a component thereof (e.g., TCRα, TCRβ, CD3γ, CD3δ, and CD3ε) and another binding domain that specifically binds a second different target, such as an oncology target (e.g., c-Met, RON, CEACAM-6, and PSMA) or a B-cell target (e.g., CD19, CD79b, HLA-DR and CD20). The binding domain specific for the second different target may have a higher affinity for its target than the affinity of the binding domain for the TCR complex or component thereof, such as CD3. Such polypeptide heterodimers will preferably bind to the oncology target or the B-cell target first and subsequently recruit T cells to the tumor or cancer cells expressing the oncology target or B-cell target and are useful in inhibiting growth, metastasis or metastatic growth of a malignancy (including B-cell cancers). Additional uses of polypeptide heterodimers provided herein include directed T cell activation and treating autoimmune or inflammatory conditions.

[0082] The section headings used herein are for organizational purposes only and are not to be construed as limiting the subject matter described. All documents, or portions of documents, cited herein, including but not limited to patents, patent applications, articles, books, and treatises, are hereby expressly incorporated by reference in their entirety for any purpose. In the event that one or more of the incorporated documents or portions of documents defines a term that contradicts that term's definition in the application, the definition that appears in this application controls.

[0083] In the present description, any concentration range, percentage range, ratio range, or integer range is to be understood to include the value of any integer within the recited range and, when appropriate, fractions thereof (such as one tenth and one hundredth of an integer), unless otherwise indicated. As used herein, “about” means±20% of the indicated range, value, sequence, or structure, unless otherwise indicated. It should be understood that the terms “a” and “an” as used herein refer to “one or more” of the enumerated components unless otherwise indicated or dictated by its context. The use of the alternative (e.g., “or”) should be understood to mean either one, both, or any combination thereof of the alternatives. As used herein, the terms “include” and “comprise” are used synonymously. In addition, it should be understood that the individual single chain polypeptides or heterodimers derived from various combinations of the structures and substituents (e.g., domains, regions, hinges, and linkers) described herein are disclosed by the present application to the same extent as if each single chain polypeptide or heterodimer were set forth individually. Thus, selection of particular components to form individual single chain polypeptides or heterodimers is within the scope of the present disclosure.

[0084] As used herein, a protein “consists essentially of” several domains (e.g., a binding domain that specifically binds a target, a hinge, an immunoglobulin heterodimerization domain, and an Fc region portion) if the other portions of the protein (e.g., amino acids at the amino- or carboxy-terminus or between two domains), in combination, contribute to at most 20% (e.g., at most 15%, 10%, 8%, 6%, 5%, 4%, 3%, 2% or 1%) of the length of the protein and do not substantially affect (i.e., do not reduce the activity by more than 50%, such as more than 40%, 30%, 25%, 20%, 15%, 10%, or 5%) the activities of various domains (e.g., the target binding affinity of the binding domain, the activities of the Fc region portion, and the capability of the immunoglobulin heterodimerization domain in facilitating heterodimerization). In certain embodiments, a protein (e.g., a single chain polypeptide) consists essentially of a binding domain that specifically binds a target, an immunoglobulin heterodimerization domain, a hinge, and an Fc region portion may comprise junction amino acids at the amino- and/or carboxy-terminus of the protein and/or between two different domains (e.g., between the binding domain and the immunoglobulin heterodimerization domain, between the immunoglobulin heterodimerization domain and the hinge, and/or between the hinge and the Fc region portion).

[0085] A “polypeptide heterodimer” or “heterodimer,” as used herein, refers to a dimer formed from two different single chain polypeptides. This term does not include an antibody formed from four single chain polypeptides (i.e., two light chains and two heavy chains). A “dimer” refers to a biological entity that consists of two subunits associated with each other via one or more forms of intramolecular forces, including covalent bonds (e.g., disulfide bonds) and other interactions (e.g., electrostatic interactions, salt bridges, hydrogen bonding, and hydrophobic interactions), and is stable under appropriate conditions (e.g., under physiological conditions, in an aqueous solution suitable for expressing, purifying, and/or storing recombinant proteins, or under conditions for non-denaturing and/or non-reducing electrophoresis).

[0086] A “single chain polypeptide” is a single, linear and contiguous arrangement of covalently linked amino acids. It does not include two polypeptide chains that link together in a non-linear fashion, such as via an interchain disulfide bond (e.g., a half immunoglobulin molecule in which a light chain links with a heavy chain via a disulfide bond). In certain embodiments, a single chain polypeptide may have or form one or more intrachain disulfide bonds.

[0087] An “immunoglobulin heterodimerization domain,” as used herein, refers to an immunoglobulin domain of a single chain polypeptide that preferentially interacts or associates with a different immunoglobulin domain of another single chain polypeptide wherein the interaction of the different heterodimerization domains substantially contributes to or efficiently promotes heterodimerization of the first and second single chain polypeptides (i.e., the formation of a dimer between two different single chain polypeptides, which is also referred to as a “heterodimer”). The interaction(s) between heterodimerization domains “substantially contributes to or efficiently promotes” the heterodimerization of first and second single chain polypeptides if there is a statistically significant reduction in the dimerization between the first and second single chain polypeptides in the absence of the heterodimerization domain of the first single chain polypeptide (HD-I) and/or the heterodimerization domain of the second single chain polypeptide (HD-II). In certain embodiments, when the first and second single chain polypeptides are co-expressed, at least 60%, at least about 60% to about 70%, at least about 70% to about 80%, at least about 80% to about 90%, 91%, 92%, 93%, 94%, 95%, 96%, 97%, 98%, 99%, or 100%, and at least about 90% to about 92%, 93%, 94%, 95%, 96%, 97%, 98%, or 99% of the first and second single chain polypeptides form heterodimers with each other. Representative immunoglobulin heterodimerization domains of the present disclosure include an immunoglobulin CH1 region, an immunoglobulin CL region (e.g., Cκ or Cλ isotypes), or derivatives thereof, including wild type immunoglobulin CH1 and CL regions and altered (or mutated) immunoglobulin CH1 and CL regions, as provided herein.

[0088] A “binding domain” or “binding region,” as used herein, refers to a protein, polypeptide, oligopeptide, or peptide that possesses the ability to specifically recognize and bind to a target (e.g., CD3, TCR, CD28, c-Met, RON). A binding domain includes any naturally occurring, synthetic, semi-synthetic, or recombinantly produced binding partner for a biological molecule or another target of interest. Exemplary binding domains include single chain antibody variable regions (e.g., domain antibodies, sFv, scFv, Fab), receptor ectodomains (e.g., c-Met, RON), or ligands (e.g., cytokines, chemokines). A variety of assays are known for identifying binding domains of the present disclosure that specifically bind a particular target, including Western blot, ELISA, and Biacore analysis.

[0089] A binding domain and a fusion protein thereof “specifically binds” a target if it binds the target with an affinity or Ka (i.e., an equilibrium association constant of a particular binding interaction with units of 1/M) equal to or greater than 10⁵ M⁻¹, while not significantly binding other components present in a test sample. Binding domains (or fusion proteins thereof) may be classified as “high affinity” binding domains (or fusion proteins thereof) and “low affinity” binding domains (or fusion proteins thereof). “High affinity” binding domains refer to those binding domains with a Kₐ of at least 10⁷ M⁻¹, at least 10⁸ M⁻¹, at least 10⁹ M⁻¹, at least 10¹⁰ M⁻¹, at least 10¹¹ M⁻¹, at least 10¹² M⁻¹, or at least 10¹³ M⁻¹. “Low affinity” binding domains refer to those binding domains with a Kₐ of up to 10⁷ M⁻¹, up to 10⁶ M⁻¹, up to 10⁵ M⁻¹. Alternatively, affinity may be defined as an equilibrium dissociation constant (K_{d}) of a particular binding interaction with units of M (e.g., 10⁻⁵ M to 10⁻¹³ M). Affinities of binding domain polypeptides and single chain polyepeptides according to the present disclosure can be readily determined using conventional techniques (see, e.g., Scatchard et al. (1949) Ann. N.Y. Acad. Sci. 51:660; and U.S. Pat. Nos. 5,283,173, 5,468,614, or the equivalent).

[0090] “T cell receptor” (TCR) is a molecule found on the surface of T cells that, along with CD3, is generally responsible for recognizing antigens bound to major histocompatibility complex (MHC) molecules. It consists of a disulfide-linked heterodimer of the highly variable α and β chains in most T cells. In other T cells, an alternative receptor made up of variable γ and δ chains is expressed. Each chain of the TCR is a member of the immunoglobulin superfamily and possesses one N-terminal immunoglobulin variable domain, one immunoglobulin constant domain, a transmembrane region, and a short cytoplasmic tail at the C-terminal end (see, Abbas and Lichtman, Cellular and Molecular Immunology (5th Ed.), Editor: Saunders, Philadelphia, 2003; Janeway et al., Immunobiology: The Immune System in Health and Disease, 4^{th} Ed., Current Biology Publications, p 148, 149, and 172, 1999). TCR as used in the present disclosure may be from various animal species, including human, mouse, rat, or other mammals.

[0091] “CD3” is known in the art as a multi-protein complex of six chains (see, Abbas and Lichtman, 2003; Janeway et al., p. 172 and 178, 1999). In mammals, the complex comprises a CD3γ chain, a CD3δ chain, two CD3ε chains, and a homodimer of CD3ζ chains. The CD3γ, CD3δ, and CD3ε chains are highly related cell surface proteins of the immunoglobulin superfamily containing a single immunoglobulin domain. The transmembrane regions of the CD3γ, CD3δ, and CD3ε chains are negatively charged, which is a characteristic that allows these chains to associate with the positively charged T cell receptor chains. The intracellular tails of the CD3γ, CD3δ, and CD3ε chains each contain a single conserved motif known as an immunoreceptor tyrosine-based activation motif or ITAM, whereas each CD3ζ chain has three. It is believed the ITAMs are important for the signaling capacity of a TCR complex. CD3 as used in the present disclosure may be from various animal species, including human, mouse, rat, or other mammals.

[0092] “TCR complex,” as used herein, refers to a complex formed by the association of CD3 with TCR. For example, a TCR complex can be composed of a CD3γ chain, a CD3δ chain, two CD3ε chains, a homodimer of CD3ζ chains, a TCRα chain, and a TCRβ chain. Alternatively, a TCR complex can be composed of a CD3γ chain, a CD3δ chain, two CD3ε chains, a homodimer of CD3ζ chains, a TCRγ chain, and a TCRδ chain.

[0093] “A component of a TCR complex,” as used herein, refers to a TCR chain (i.e., TCRα, TCRβ, TCRγ or TCRδ), a CD3 chain (i.e., CD3γ, CD3δ, CD3ε or CD3ζ), or a complex formed by two or more TCR chains or CD3 chains (e.g., a complex of TCRα and TCRβ, a complex of TCRγ and TCRδ, a complex of CD3ε and CD3δ, a complex of CD3γ and CD3ε, or a sub-TCR complex of TCRα, TCRβ, CD3γ, CD3δ, and two CD3ε chains).

[0094] Terms understood by those in the art of antibody technology are each given the meaning acquired in the art, unless expressly defined differently herein. Antibodies are known to have variable regions, a hinge region, and constant domains. Immunoglobulin structure and function are reviewed, for example, in Harlow et al., Eds., Antibodies: A Laboratory Manual, Chapter 14 (Cold Spring Harbor Laboratory, Cold Spring Harbor, 1988).

[0095] For example, the terms “VL” and “VH” refer to the variable binding region from an antibody light and heavy chain, respectively. The variable binding regions are made up of discrete, well-defined sub-regions known as “complementarity determining regions” (CDRs) and “framework regions” (FRs). The term “CL” refers to an “immunoglobulin light chain constant region” or a “light chain constant region,” i.e., a constant region from an antibody light heavy chain. The term “CH” refers to an “immunoglobulin heavy chain constant region” or a “heavy chain constant region,” which is further divisible, depending on the antibody isotype into CH1, CH2, and CH3 (IgA, IgD, IgG), or CH1, CH2, CH3, and CH4 domains (IgE, IgM). A “Fab” (fragment antigen binding) is the part of an antibody that binds to antigens and includes the variable region and CH1 of the heavy chain linked to the light chain via an inter-chain disulfide bond.

[0096] As used herein, “an Fc region constant domain portion” or “Fc region portion” refers to the heavy chain constant region segment of the Fc fragment (the “fragment crystallizable” region or Fc region) from an antibody, which can include one or more constant domains, such as CH2, CH3, CH4, or any combination thereof. By way of background, the Fc region is responsible for the effector functions of an immunoglobulin, such as ADCC (antibody-dependent cell-mediated cytotoxicity), ADCP (antibody-dependent cellular phagocytosis), CDC (complement-dependent cytotoxicity) and complement fixation, binding to Fc receptors (e.g., CD16, CD32, FcRn), greater half-life in vivo relative to a polypeptide lacking an Fc region, protein A binding, and perhaps even placental transfer (see Capon et al., Nature, 337:525 (1989)).

[0097] In addition, antibodies have a hinge sequence that is typically situated between the Fab and Fc region (but a lower section of the hinge may include an amino-terminal portion of the Fc region). By way of background, an immunoglobulin hinge acts as a flexible spacer to allow the Fab portion to move freely in space. In contrast to the constant regions, hinges are structurally diverse, varying in both sequence and length between immunoglobulin classes and even among subclasses. For example, a human IgG1 hinge region is freely flexible, which allows the Fab fragments to rotate about their axes of symmetry and move within a sphere centered at the first of two inter-heavy chain disulfide bridges. By comparison, a human IgG2 hinge is relatively short and contains a rigid poly-proline double helix stabilized by four inter-heavy chain disulfide bridges, which restricts the flexibility. A human IgG3 hinge differs from the other subclasses by its unique extended hinge region (about four times as long as the IgG1 hinge), containing 62 amino acids (including 21 prolines and 11 cysteines), forming an inflexible poly-proline double helix and providing greater flexibility because the Fab fragments are relatively far away from the Fc fragment. A human IgG4 hinge is shorter than IgG1 but has the same length as IgG2, and its flexibility is intermediate between that of IgG1 and IgG2.

[0098] According to crystallographic studies, an IgG hinge domain can be functionally and structurally subdivided into three regions: the upper, the core or middle, and the lower hinge regions (Shin et al., Immunological Reviews 130:87 (1992)). Exemplary upper hinge regions include EPKSCDKTHT (SEQ ID NO:227) as found in IgG1, ERKCCVE (SEQ ID NO:211) as found in IgG2, ELKTPLGDTT HT (SEQ ID NO:245) or EPKSCDTPPP (SEQ ID NO:246) as found in IgG3, and ESKYGPP (SEQ ID NO:247) as found in IgG4. Exemplary middle or core hinge regions include CPPCP (SEQ ID NO:228) as found in IgG1 and IgG2, CPRCP (SEQ ID NO:248) as found in IgG3, and CPSCP (SEQ ID NO:249) as found in IgG4. While IgG1, IgG2, and IgG4 antibodies each appear to have a single upper and middle hinge, IgG3 has four in tandem—one being ELKTPLGDTTHTCPRCP (SEQ ID NO:250) and three being EPKSCDTPPP CPRCP (SEQ ID NO:251).

[0099] IgA and IgD antibodies appear to lack an IgG-like core region, and IgD appears to have two upper hinge regions in tandem (see SEQ ID NOS:222 and 252). Exemplary wild type upper hinge regions found in IgA1 and IgA2 antibodies are set forth in SEQ ID NOS:215 and 216.

[0100] IgE and IgM antibodies, in contrast, lack a typical hinge region and instead have a CH2 domain with hinge-like properties. Exemplary wild-type CH2 upper hinge-like sequences of IgE and IgM are set forth in SEQ ID NO:253 (VCSRDFTPPTVKILQSSSDGGGHFPPTIQLLCLVSGYTPGTINITWLEDG QVMDVDLSTASTTQEGELASTQSELTLSQKHWLSDRTYTCQVTYQGHTFE DSTKKCA) and SEQ ID NO:254 (VIAELPPKVSVFVPPRDGFFGNPRKSKLIC QATGFSPRQIQVSWLREGKQVGSGVTTDQVQAEAKESGPTTYKVTSTLTI KESDWLGQSMFTCRVDHRGLTFQQNASSMCVP), respectively.

[0101] As used herein, a “hinge region” or a “hinge” refers to (a) an immunoglobulin hinge region (made up of, for example, upper and core regions) or a functional variant thereof, including wild type and altered immunoglobulin hinges, (b) a lectin interdomain region or a functional variant thereof, (c) a cluster of differentiation (CD) molecule stalk region or a functional variant thereof, or (d) a portion of a cell surface receptor (interdomain region) that connects immunoglobulin V-like or immunoglobulin C-like domains.

[0102] As used herein, a “wild type immunoglobulin hinge region” refers to a naturally occurring upper and middle hinge amino acid sequences interposed between and connecting the CH1 and CH2 domains (for IgG, IgA, and IgD) or interposed between and connecting the CH1 and CH3 domains (for IgE and IgM) found in the heavy chain of an antibody. In certain embodiments, a wild type immunoglobulin hinge region sequence is human, and may comprises a human IgG hinge region. Exemplary human wild type immunoglobulin hinge regions are set forth in SEQ ID NOS:215 (IgA1 hinge), 216 (IgA2 hinge), 217 (IgD hinge), 667 (IgG1 hinge), 219 (IgG2 hinge), 220 (IgG3 hinge) and 221 (IgG4 hinge).

[0103] An “altered wild type immunoglobulin hinge region” or “altered immunoglobulin hinge region” refers to (a) a wild type immunoglobulin hinge region with up to 30% amino acid changes (e.g., up to 25%, 20%, 15%, 10%, or 5% amino acid substitutions or deletions), or (b) a portion of a wild type immunoglobulin hinge region that has a length of about 5 amino acids (e.g., about 5, 6, 7, 8, 9, 10, 11, 12, 13, 14, 15, 16, 17, 18, 19, or 20 amino acids) up to about 120 amino acids (for instance, having a length of about 10 to about 40 amino acids or about 15 to about 30 amino acids or about 15 to about 20 amino acids or about 20 to about 25 amino acids), has up to about 30% amino acid changes (e.g., up to about 25%, 20%, 15%, 10%, 5%, 4%, 3%, 2%, or 1% amino acid substitutions or deletions or a combination thereof), and has an IgG core hinge region as set forth in SEQ ID NOS:228, 248, or 249.

[0104] A “peptide linker” refers to an amino acid sequence that connects a heavy chain variable region to a light chain variable region and provides a spacer function compatible with interaction of the two sub-binding domains so that the resulting polypeptide retains a specific binding affinity to the same target molecule as an antibody that comprises the same light and heavy chain variable regions. In certain embodiments, a linker is comprised of five to about 35 amino acids, for instance, about 15 to about 25 amino acids.

[0105] “Junction amino acids” or “junction amino acid residues” refer to one or more (e.g., about 2-10) amino acid residues between two adjacent regions or domains of a single chain polypeptide, such as between a hinge and an adjacent Fc region portion or between a hinge and an adjacent binding domain or between a peptide linker that links two immunoglobulin variable domains and an adjacent immunoglobulin variable domain. Junction amino acids may result from the construct design of a single chain polypeptide (e.g., amino acid residues resulting from the use of a restriction enzyme site during the construction of a nucleic acid molecule encoding a single chain polypeptide).

[0106] A “linker between CH3 and CH1 or CL” refers to one or more (e.g., about 2-12) amino acid residues between the C-terminus of a CH3 domain (e.g., a wild type CH3 or a mutated CH3) and the N-terminus of a CH1 domain or CL domain (e.g., Ck).

[0107] A “wild type immunoglobulin region” or “wild type immunoglobulin domain” refers to a naturally occurring immunoglobulin region or domain (e.g., a naturally occurring VL, VH, hinge, CL, CH1, CH2, CH3, or CH4) from various immunoglobulin classes or subclasses (including, for example, IgG1, IgG2, IgG3, IgG4, IgA1, IgA2, IgD, IgE, and IgM) and from various species (including, for example, human, sheep, mouse, rat, and other mammals). Exemplary wild type human CH1 regions are set forth in SEQ ID NOS:114, 186-192 and 194, wild type human Cκ region in SEQ ID NO:112, wild type human Cλ regions in SEQ ID NO:113 and 224-226, wild type human CH2 domains in SEQ ID NOS:115, 195-201 and 203, wild type human CH3 domains in SEQ ID NOS:116, 204-210 and 212, and wild type human CH4 domains in SEQ ID NO:213 and 214.

[0108] An “altered immunoglobulin region,” “altered immunoglobulin domain,” “mutated immunoglobulin domain,” or the like, refers to an immunoglobulin region with a sequence identity to a wild type immunoglobulin region or domain (e.g., a wild type VL, VH, hinge, CL, CH1, CH2, CH3, or CH4) of at least 75% (e.g., 80%, 82%, 84%, 86%, 88%, 90%, 91%, 92%, 93%, 94%, 95%, 96%, 97%, 98%, 99%, or 99.5%). For example, an “altered immunoglobulin CH1 region” or “altered CH1 region” refers to a CH1 region with a sequence identity to a wild type immunoglobulin CH1 region (e.g., a human CH1) of at least 75% (e.g., 80%, 82%, 84%, 86%, 88%, 90%, 91%, 92%, 93%, 94%, 95%, 96%, 97%, 98%, 99%, or 99.5%). Similarly, an “altered immunoglobulin CH2 domain” or “altered CH2 domain” refers to a CH2 domain with a sequence identity to a wild type immunoglobulin CH2 region (e.g., a human CH2) of at least 75% (e.g., 80%, 82%, 84%, 86%, 88%, 90%, 91%, 92%, 93%, 94%, 95%, 96%, 97%, 98%, 99%, or 99.5%).

[0109] “Sequence identity,” as used herein, refers to the percentage of amino acid residues in one sequence that are identical with the amino acid residues in another reference polypeptide sequence after aligning the sequences and introducing gaps, if necessary, to achieve the maximum percent sequence identity, and not considering any conservative substitutions as part of the sequence identity. The percentage sequence identity values are generated by the NCBI BLAST2.0 software as defined by Altschul et al. (1997) “Gapped BLAST and PSI-BLAST: a new generation of protein database search programs,” Nucleic Acids Res. 25:3389-3402, with the parameters set to default values.

[0110] In certain embodiments, an altered immunoglobulin domain only contains conservative amino acid substitutions of a wild type immunoglobulin domain. In certain other embodiments, an altered immunoglobulin domain only contains non-conservative amino acid substitutions of a wild type immunoglobulin domain. In yet other embodiments, an altered immunoglobulin domain contains both conservative and non-conservative amino acid substitutions.

[0111] A “conservative substitution” is recognized in the art as a substitution of one amino acid for another amino acid that has similar properties. Exemplary conservative substitutions are well known in the art (see, e.g., WO 97/09433, page 10, published Mar. 13, 1997; Lehninger, Biochemistry, Second Edition; Worth Publishers, Inc. NY:N.Y. (1975), pp. 71-77; Lewin, Genes IV, Oxford University Press, NY and Cell Press, Cambridge, Mass. (1990), p. 8). In certain embodiments, a conservative substitution includes a leucine to serine substitution.

[0112] As used herein, the term “derivative” refers to a modification of one or more amino acid residues of a peptide by chemical or biological means, either with or without an enzyme, e.g., by glycosylation, alkylation, acylation, ester formation, or amide formation. Generally, a “derivative” differs from an “analogue” in that a parent polypeptide may be the starting material to generate a “derivative,” whereas the parent polypeptide may not necessarily be used as the starting material to generate an “analogue.” A derivative may have different chemical, biological or physical properties of the parent polypeptide. For example, a derivative may be more hydrophilic or it may have altered reactivity (e.g., a CDR having an amino acid change that alters its affinity for a target) as compared to the parent polypeptide.

[0113] As used herein, unless otherwise provided, a position of an amino acid residue in a variable region of an immunoglobulin molecule is numbered according to the Kabat numbering convention (Kabat, Sequences of Proteins of Immunological Interest, 5^{th} ed. Bethesda, Md.: Public Health Service, National Institutes of Health (1991)), and a position of an amino acid residue in a constant region of an immunoglobulin molecule is numbered according to EU nomenclature (Ward et al., 1995 Therap. Immunol. 2:77-94).

[0114] A “receptor” is a protein molecule present in the plasma membrane or in the cytoplasm of a cell to which a signal molecule (i.e., a ligand, such as a hormone, a neurotransmitter, a toxin, a cytokine) may attach. The binding of the signal molecule to the receptor results in a conformational change of the receptor, which ordinarily initiates a cellular response. However, some ligands merely block receptors without inducing any response (e.g., antagonists). Some receptor proteins are peripheral membrane proteins. Many hormone and neurotransmitter receptors are transmembrane proteins that are embedded in the phospholipid bilayer of cell membranes, and another major class of receptors are intracellular proteins such as those for steroid and intracrine peptide hormone receptors.

[0115] “B-cell associated disorder or disease” or “a disease or disorder associated with aberrant B-cell activity” refers to a disease or disorder associated with (e.g., causing or resulting from) aberrant B-cell activity or activity that deviates from the normal, proper, or expected course. For example, a B-cell associated disorder or disease may include inappropriate proliferation of B-cells that have damaged or defective DNA or other cellular components. Aberrant B-cell activity may include cell proliferation characterized by inappropriately high levels of B-cell division, inappropriately low levels of B-cell apoptosis, or both. Such diseases may have, for example, single or multiple local abnormal proliferations of B-cells, groups of B-cells or tissue(s), whether cancerous or non-cancerous, benign or malignant. A B-cell associated disorder or disease may also include aberrant antibody production, such as production of autoantibodies, or overproduction of antibodies more desirable when produced at normal levels. It is also contemplated herein that aberrant B-cell activity may occur in certain subpopulations of B-cells and not in other subpopulations, or may include inappropriate stimulation of T-cells, such as by inappropriate antigen presentation to T-cells or by other B-cell pathways. Examples of B-cell associated disorders or diseases include a B-cell malignancy or B-cell cancer (e.g., B-cell lymphoma, B-cell leukemia or B-cell myeloma), a disease characterized by autoantibody production (e.g., autoimmune diseases) or inflammation or a disease characterized by inappropriate T-cell stimulation caused by inappropriate B-cell antigen presentation to T-cells or caused by other pathways involving B-cells.

[0116] “Treatment,” “treating” or “ameliorating” refers to either a therapeutic treatment or prophylactic/preventative treatment. A treatment is therapeutic if at least one symptom of disease in an individual receiving treatment improves or a treatment may delay worsening of a progressive disease in an individual, or prevent onset of additional associated diseases.

[0117] A “therapeutically effective amount (or dose)” or “effective amount (or dose)” of a specific binding molecule or compound refers to that amount of the compound sufficient to result in amelioration of one or more symptoms of the disease being treated in a statistically significant manner. When referring to an individual active ingredient, administered alone, a therapeutically effective dose refers to that ingredient alone. When referring to a combination, a therapeutically effective dose refers to combined amounts of the active ingredients that result in the therapeutic effect, whether administered serially or simultaneously (in the same formulation or concurrently in separate formulations).

[0118] The term “pharmaceutically acceptable” refers to molecular entities and compositions that do not produce allergic or other serious adverse reactions when administered using routes well known in the art.

[0119] A “patient in need” refers to a patient at risk of, or suffering from, a disease, disorder or condition that is amenable to treatment or amelioration with a polypeptide heterodimer or a composition thereof provided herein.

[0120] The term “immunoglobulin-derived fusion protein,” as used herein, refers to a fusion protein that comprises at least one immunoglobulin region, such as a VL, VH, CL, CH1, CH2, CH3, and CH4 domain. The immunoglobulin region may be a wild type immunoglobulin region or an altered immunoglobulin region. Exemplary immunoglobulin-derived fusion proteins include single chain variable antibody fragment (scFv) (see, e.g., Huston et al., Proc. Natl. Acad. Sci. USA 85: 5879-83, 1988), SMIP™ proteins (see, U.S. Patent Publication Nos. 2003/0133939, 2003/0118592, and 2005/0136049), PIMS proteins (see, PCT Application Publication No. WO 2009/023386), and multi-functional binding proteins (such as SCORPION™ and Xceptor proteins) (see, PCT Application Publication No. WO 2007/146968, U.S. Patent Application Publication No. 2006/0051844, and U.S. Pat. No. 7,166,707).

[0121] Additional definitions are provided throughout the present disclosure.

### Polypeptide Heterodimers

[0122] In one aspect, the present disclosure provides a polypeptide heterodimer formed by the association of two different single chain polypeptides. The first single chain polypeptide (SCP-I) comprises, consists essentially of, or consists of from one to four binding domains that specifically bind from one to four targets, a hinge (H-I), an immunoglobulin heterodimerization domain (HD-I), and an Fc region portion (FRP-I), whereas the second single chain polypeptide (SCP-II) comprises, consists essentially of, or consists of from zero to four binding domains that specifically bind from zero to four targets, a hinge (H-II), an immunoglobulin heterodimerization domain (HD-II), and an Fc region portion (FRP-II), provided that the polypeptide heterodimer comprises at least two binding domains that specifically bind to one or more targets, for instance, at least two different targets. The H-I and H-II may have the same sequence, but may be different. The HD-I may comprise an immunoglobulin CH1 region, and the HD-II may comprise an immunoglobulin CL region. Alternatively, the HD-I may comprise an immunoglobulin CL region, and the HD-II may comprise an immunoglobulin CH1 region. The FRP-I and FRP-II may have the same sequence, but may be different. The individual components of the polypeptide heterodimers of the present disclosure are described in detail herein.

[0123] Binding Domains

[0124] As indicated above, the polypeptide heterodimer of the present disclosure comprises two single chain polypeptides: One single chain polypeptide comprises from one to four binding domains that specifically bind from one to four targets, and the other single chain polypeptide of the polypeptide heterodimer comprises from zero to four binding domains that bind from zero to four targets. The total number of binding domains of the polypeptide heterodimer ranges from about two to eight, and the total number of different targets that the binding domains bind ranges from about one to eight, for instance, from two to eight, two to four, two to three or two targets.

[0125] If a single chain polypeptide of a polypeptide heterodimer comprises a single binding domain, the binding domain may be located either amino or carboxyl terminal to the Fc region portion of the single chain polypeptide. For example, a single chain polypeptide comprising two binding domains may have one binding domain located amino terminal and the other carboxyl terminal to the Fc region portion of the single chain polypeptide, or both binding domains may be amino terminal or both carboxyl terminal to the Fc region portion. In another example, a single chain polypeptide may comprise three binding domains wherein (a) two binding domains are amino terminal on different single chain proteins and the third binding domain is carboxyl terminal to the Fc region portion on either SCP-I or SCP-II, (b) two binding domains are carboxyl terminal on different single chain proteins and the third binding domain is amino terminal to the Fc region portion on either SCP-I or SCP-II. In still a further example, a polypeptide heterodimer may comprise four binding domains, wherein two binding domains are located amino terminal to the Fc region portion on different chains and the other two binding domains are located carboxyl terminal to the Fc region portion on different chains. Alternatively, in any of these embodiments, two binding domains may be linked to each other in tandem and located on either SCP-I or SCP-II or both, depending on the number of binding domains present—the tandem stacking is used when five to eight binding domains combined are present in SCP-I and SCP-II.

[0126] Binding of a target by a binding domain modulates the interaction between the target (e.g., a receptor or a ligand) and another molecule. In certain embodiments, the binding of a target (e.g., a receptor) by a binding domain stimulates certain functions of the target (e.g., signal transduction) or brings different targets closer together for a biological effect (e.g., directing T cells to a tumor which in turn activates the T cells). In certain other embodiments, the binding of a target by a binding domain blocks the interaction between the target and another molecule and thus interferes, reduces or eliminates certain functions of the target.

[0127] A target molecule, which is specifically bound by a binding domain contained in a polypeptide heterodimer of the present disclosure, may be found on or in association with a cell of interest (“target cell”). Exemplary target cells include cancer cells, cells associated with an autoimmune disease or disorder or with an inflammatory disease or disorder, B-cells and T-cells. A target molecule may also not be associated with a cell. Exemplary target molecules not associated with a cell include soluble proteins, secreted proteins, deposited proteins, and extracellular structural (matrix) proteins.

[0128] In certain embodiments, binding domains of polypeptide heterodimers of the present disclosure specifically bind a target selected from T-cell targets, tumor antigens, B-cell targets, pro-inflammatory cytokines or chemokines, pro-oncogenic cytokines or growth factors, angiogenic agents, Fc receptors, transferrin receptor, receptor tyrosine kinases (RTKs), TNFSFRs, or any combination thereof. For instance, polypeptide heterodimers of the present disclosure specifically bind a T-cell target and a tumor target.

[0129] In certain embodiments, a binding domain of a polypeptide heterodimer of the present disclosure specifically binds a T-cell target, such as a TCR complex or a component thereof (e.g., TCRα, TCRβ, CD3γ, CD3δ, and CD3ε), CD28, PD-1, HVEM, BTLA, CD80, CD86, GITR, and TGFBR1.

[0130] In certain embodiments, a binding domain of polypeptide heterodimer of the present disclosure specifically binds a TCR complex or a component thereof. For example, in certain embodiments, a binding domain specifically binds to an individual human CD3 chain (e.g., human CD3γ chain, human CD3δ chain, and human CD36ε chain) or a combination of two or more of the individual human CD3 chains (e.g., a complex of human CD3γ and human CD3ε or a complex of human CD3δ and human CD3ε). In certain embodiments, a binding domain specifically binds to a human CD36ε chain. In certain other embodiments, a binding domain specifically binds to one or more of human TCRα, human TCRβ, or a heterodimer formed from human TCRα and human TCRβ. In certain other embodiments, a binding domain of the present disclosure binds to a complex formed from one or more human CD3 chains with one or more human TCR chains, such as a complex formed from a human CD3γ chain, a human CD3δ chain, or a human CD3ε chain with a human TCRα chain or a human TCRβ chain. In any of these embodiments, a polypeptide heterodimer of the present disclosure may also bind a tumor target.

[0131] In certain embodiments, one or more binding domains of a polypeptide heterodimer of the present disclosure specifically bind a tumor target, including RON, c-Met, CEACAM-6, PSMA, EpCAM, CEA, PCTA-1, STEAP-1, PSCA, ALCAM (CD166), EphA2, CD151, CA-125, MUC-1, MAGE-1, TROP2, IGF1R, CD44v6, CD151, TGFBR2, GHRHR, GHR, IL-6R, gp130, TNFR2, OSMRβ, Patched-1, Frizzled, Robo1, LTβT, CD80, CD81, CD86, CCR5, HER-3, HER-4, EGFR, CEA, MUC2, MUC3, MUC4, MUC5_{AC}, MUC5_{b}, MUC7, βhCG, Lewis-Y, CD33, CD30, ganglioside GD3, 9-O-Acetyl-GD3, GM2, Globo H, fucosyl GM1, Poly SA, GD2, Carboanhydrase IX (MN/CA IX), CD44v6, Sonic Hedgehog (Shh), Wue-1, Plasma Cell Antigen, (membrane-bound) IgE, Melanoma Chondroitin Sulfate Proteoglycan (MCSP), CCR8, TNF-alpha precursor, STEAP-2, mesothelin, A33 Antigen, Prostate Stem Cell Antigen (PSCA), Ly-6; desmoglein 4, E-cadherin neoepitope, Fetal Acetylcholine Receptor, CD25, CA19-9 marker, CA-125 marker and Muellerian Inhibitory Substance (MIS) Receptor type II, sTn (sialylated Tn antigen; TAG-72), FAP (fibroblast activation antigen), endosialin, EGFRvIII, LG, SAS, CD63, B7-H3, or any combination thereof.

[0132] In certain embodiments, one or more binding domains of a polypeptide heterodimer of the present disclosure specifically bind a B-cell target, such as CD19, CD20, CD21, CD22, CD30, CD33, CD37, CD38, CD70, CD79b, HLA-DR, or any combination thereof.

[0133] In certain embodiments, one or more binding domains of a polypeptide heterodimer of the present disclosure specifically bind a pro-inflammatory cytokine or chemokine, such as TNFα, IL-6, hyperIL-6, IL-2, IL-1, IL-8, IP-10, IFNγ, IFNα, RANKL, FASL, TGFβ, IL7, IL10, IL17A/F, TWEAK, CSF2, IGF1, IGF2 or BLyS/APRIL, or any combination thereof.

[0134] In certain embodiments, one or more binding domains of a polypeptide heterodimer of the present disclosure specifically bind a pro-oncogenic cytokine or growth factor, such as HGF, MSP, EGF (including epiregulin, herregulin, β-regulin, neuregulin), HIF-1α, VEGFA, VEGFB, VEGFC, VEGFD, TNFα, IL-6, hyperIL-6, IL-8, Wnt, sHH, TGFβ, PDGF, or any combination thereof.

[0135] In certain embodiments, one or more binding domains of a polypeptide heterodimer of the present disclosure specifically bind an angiogenic agent, such as PDGFR, VEGFR1-4, NRP1, Angiopoietin 2, c-Met or any combination thereof.

[0136] In certain embodiments, one or more binding domains of a polypeptide heterodimer of the present disclosure specifically bind an Fc receptor, such as CD64, CD32A, CD32B, CD16, FcRn, or any combination thereof.

[0137] In certain embodiments, a binding domain of a polypeptide heterodimer of the present disclosure specifically binds a transferrin receptor, such as CD71.

[0138] In certain embodiments, one or more binding domains of a polypeptide heterodimer of the present disclosure specifically binds a receptor tyrosine kinase, such as EGFR, EGFRvIII, ErbB2, ErbB3, ErbB4, IGF1R, EphA2, c-Met, RON, or any combination thereof.

[0139] In certain embodiments, one or more binding domains of a polypeptide heterodimer of the present disclosure specifically binds a TNFSFR, such as TNFR1, TNFR2, TWEAKR, TACI, BAFF-R, BCMA, FAS, OX40, GITR, 4-1-BB, LTbetaR, HVEM, RANK, or any combination thereof.

[0140] In certain embodiments, one or more binding domains of a polypeptide heterodimer of the present disclosure specifically bind hyperIL-6, IL-10, LIGHT, CD40, PDL1, PDL2, or any combination thereof.

[0141] In certain embodiments, one or more binding domains of a polypeptide heterodimer of the present disclosure are an agonist of one of the following molecules: IL-10, HLA-G, HGF, IL-35, PD-1, BTLA, TNFR1, TNFR2, DR4, DR5, TWEAKR, FAS, or any combination thereof.

[0142] A binding domain may be any peptide that specifically binds a target of interest. Sources of binding domains include antibody variable regions from various species (which can be formatted as antibodies, sFvs, scFvs, Fabs, or soluble VH domain or domain antibodies), including human, rodent, avian, and ovine. Additional sources of binding domains include variable regions of antibodies from other species, such as camelid (from camels, dromedaries, or llamas; Ghahroudi et al. (1997) FEBS Letters 414(3):521-526; Vincke et al. (2009) Journal of Biological Chemistry (2009) 284:3273-3284; Hamers-Casterman et al. (1993) Nature, 363:446 and Nguyen et al. (1998) J. Mol. Biol., 275:413), nurse sharks (Roux et al. (1998) Proc. Nat'l. Acad. Sci. (USA) 95:11804), spotted ratfish (Nguyen et al. (2002) Immunogenetics, 54:39), or lamprey (Herrin et al., (2008) Proc. Nat'l. Acad. Sci. (USA) 105:2040-2045 and Alder et al. (2008) Nature Immunology 9:319-327). These antibodies can apparently form antigen-binding regions using only heavy chain variable region, i.e., these functional antibodies are homodimers of heavy chains only (referred to as “heavy chain antibodies”) (Jespers et al. (2004) Nature Biotechnology 22:1161-1165; Cortez-Retamozo et al. (2004) Cancer Research 64:2853-2857; Baral et al. (2006) Nature Medicine 12:580-584, and Barthelemy et al. (2008) Journal of Biological Chemistry 283:3639-3654).

[0143] Exemplary anti-CD3 antibodies from which the binding domain of this disclosure may be derived include Cris-7 monoclonal antibody (Reinherz, E. L. et al. (eds.), Leukocyte typing II., Springer Verlag, New York, (1986)), BC3 monoclonal antibody (Anasetti et al. (1990) J. Exp. Med. 172:1691), OKT3 (Ortho multicenter Transplant Study Group (1985) N. Engl. J. Med. 313:337) and derivatives thereof such as OKT3 ala-ala (Herold et al. (2003) J. Clin. Invest. 11:409), visilizumab (Carpenter et al. (2002) Blood 99:2712), and 145-2C11 monoclonal antibody (Hirsch et al. (1988) J. Immunol. 140: 3766). An exemplary anti-TCR antibody is H57 monoclonal antibody (Lavasani et al. (2007) Scandinavian Journal of Immunology 65:39-47).

[0144] An alternative source of binding domains of this disclosure includes sequences that encode random peptide libraries or sequences that encode an engineered diversity of amino acids in loop regions of alternative non-antibody scaffolds, such as fibrinogen domains (see, e.g., Weisel et al. (1985) Science 230:1388), Kunitz domains (see, e.g., U.S. Pat. No. 6,423,498), ankyrin repeat proteins (Binz et al. (2003) Journal of Molecular Biology 332:489-503 and Binz et al. (2004) Nature Biotechnology 22(5):575-582), fibronectin binding domains (Richards et al. (2003) Journal of Molecular Biology 326:1475-1488; Parker et al. (2005) Protein Engineering Design and Selection 18(9):435-444 and Hackel et al. (2008) Journal of Molecular Biology 381:1238-1252), cysteine-knot miniproteins (Vita et al. (1995) Proc. Nat'l. Acad. Sci. (USA) 92:6404-6408; Martin et al. (2002) Nature Biotechnology 21:71-76 and Huang et al. (2005) Structure 13:755-768), tetratricopeptide repeat domains (Main et al. (2003) Structure 11:497-508 and Cortajarena et al. (2008) ACS Chemical Biology 3:161-166), leucine-rich repeat domains (Stumpp et al. (2003) Journal of Molecular Biology 332:471-487), lipocalin domains (see, e.g., WO 2006/095164, Beste et al. (1999) Proc. Nat'l. Acad. Sci. (USA) 96:1898-1903 and Schonfeld et al. (2009) Proc. Nat'l. Acad. Sci. (USA) 106:8198-8203), V-like domains (see, e.g., US Patent Application Publication No. 2007/0065431), C-type lectin domains (Zelensky and Gready (2005) FEBS J. 272:6179; Beavil et al. (1992) Proc. Nat'l. Acad. Sci. (USA) 89:753-757 and Sato et al. (2003) Proc. Nat'l. Acad. Sci. (USA) 100:7779-7784), mAb² or FCAB™ (see, e.g., PCT Patent Application Publication Nos. WO 2007/098934; WO 2006/072620), or the like (Nord et al. (1995) Protein Engineering 8(6):601-608; Nord et al. (1997) Nature Biotechnology 15:772-777; Nord et al. (2001) European Journal of Biochemistry 268(15):4269-4277 and Binz et al. (2005) Nature Biotechnology 23:1257-1268).

[0145] Binding domains of this disclosure can be generated as described herein or by a variety of methods known in the art (see, e.g., U.S. Pat. Nos. 6,291,161 and 6,291,158). For example, binding domains of this disclosure may be identified by screening a Fab phage library for Fab fragments that specifically bind to a target of interest (see Hoet et al. (2005) Nature Biotechnol. 23:344). Additionally, traditional strategies for hybridoma development using a target of interest as an immunogen in convenient systems (e.g., mice, HUMAB MOUSE®, TC MOUSE™, KM-MOUSE®, llamas, chicken, rats, hamsters, rabbits, etc.) can be used to develop binding domains of this disclosure.

[0146] In certain embodiments, a polypeptide heterodimer comprises a CD86 binding domain, such as a CTLA4 ectodomain, a CD28 ectodomain, or an immunoglobulin variable region binding domain (such as a scFv) specific for CD86 (e.g., from monoclonal antibodies 3D1 or FUN1). In some embodiments, less than an entire ectodomain is used. For example, domains within the CTLA4 ectodomain that bind CD86 and prevent binding of CD86 to CD28 can be used. The CD86 binding domain can block binding of CD86 to CD28 and thereby downregulate T-cell activation.

[0147] In certain embodiments, a polypeptide heterodimer comprises an IL-10 agonist, such as IL-10, monoIL-10, or a functional region thereof. “MonoIL-10” refers to an IL-10 molecule having a short linker (GGGSGG, SEQ ID NO:760) that separates the two subdomains of the molecule (amino and carboxyl end domains) so that these subdomains can form an intramolecular dimer.

[0148] In certain embodiments, a polypeptide heterodimer comprises an HLA-G agonist, such as an HLA-G5, an HLA-G1, an HLA-G mutein, or a functional region thereof an ectodomain of an HLA-G5, an HLA-G1 or an HLA-G mutein; or an immunoglobulin variable region binding domain (such as an scFv) specific for ILT2, ILT4 or KIR2DL4.

[0149] In certain embodiments, a polypeptide heterodimer comprises an HGF agonist, such as an HGF or a sub-domain thereof.

[0150] In certain embodiments, a polypeptide heterodimer comprises an IL35 agonist, such as an immunoglobulin variable region binding domain (such as an scFv) specific for IL35R or IL35, or a functional region thereof.

[0151] In certain embodiments, a polypeptide heterodimer comprises a LIGHT antagonist, such as an immunoglobulin variable region binding domain (such as an scFv) specific for LIGHT, or a HVEM ectodomain or a functional region thereof.

[0152] In certain embodiments, a polypeptide heterodimer comprises a PD-1 agonist, such as an immunoglobulin variable region binding domain (such as an scFv) specific for PD-1, or a PD-1 ligand (e.g. PD-L1 or PD-L2) or a functional region thereof.

[0153] In certain embodiments, a polypeptide heterodimer comprises a BTLA agonist, such as an immunoglobulin-like variable region binding domain (such as an scFv) specific for BTLA, or a HVEM ectodomain or a functional region thereof.

[0154] In certain embodiments, a polypeptide heterodimer comprises a GITRL antagonist, such as an immunoglobulin-like variable region binding domain (such as an scFv) specific for GITRL, or a GITR ectodomain, soluble GITR, or a functional region thereof.

[0155] In certain embodiments, a polypeptide heterodimer comprises a CD40 antagonist, such as an immunoglobulin-like variable region binding domain (such as an scFv) specific for CD40.

[0156] In some embodiments, a binding domain is a single chain Fv fragment (scFv) that comprises VH and VL regions specific for a target of interest. In certain embodiments, the V_{H} and V_{L} domains are human. Exemplary VH regions include the VH region of 2E12 (anti-CD28) scFv as set forth in SEQ ID NO:106, the VH region of P2C2 (anti-CD79b) scFv as set forth in SEQ ID NO:184, the VH region of 5D5 (anti-c-Met) scFv as set forth in SEQ ID NO:258, the VH region of A2 (anti-hyperIL-6) scFv as set forth in SEQ ID NO:80, the VH region of 3D1 (anti-CD86) scFv as set forth in SEQ ID NO:92, the VH region of MET021 (anti-c-Met) scFv as set forth in SEQ ID NO:100, the VH region of G19-4 (anti-CD3) scFv as set forth in SEQ ID NO:103, the VH region of HD37 (anti-CD19) scFv as set forth in SEQ ID NO:117, the VH region of M0042 (anti-HLA-DR) scFv as set forth in SEQ ID NO:121, the VH region of BMA031 (anti-TCR) scFv as set forth in SEQ ID NO:828, the VH region of OKT3-M (anti-CD3) scFv as set forth in SEQ ID NO:831, and the VH region of HuM291 (anti-CD3) scFv as set forth in SEQ ID NO:835. The nucleotide sequences encoding the VH regions of the A2 (anti-hyperIL-6) and 3D1 (anti-CD86) scFv's are set forth in SEQ ID NOS:79 and 91, respectively.

[0157] Exemplary VL domains are the VL region of 2E12 (anti-CD28) scFv as set forth in SEQ ID NO:107, the VL region of P2C2 (anti-CD79b) scFv as set forth in SEQ ID NO:182, the VL region of 5D5 (anti-c-Met) scFv as set forth in SEQ ID NO:259, the VL region of A2 (anti-hyper IL-6) scFv as set forth in SEQ ID NO:84, the VL region of 3D1 (anti-CD86) scFv as set forth in SEQ ID NO:96, the VL region of MET021 (anti-c-Met) scFv as set forth in SEQ ID NO:101, the VL region of G19-4 (anti-CD3) scFv as set forth in SEQ ID NO:104, the VL region of HD37 (anti-CD19) scFv as set forth in SEQ ID NO:119, the VL region of M0042 (anti-HLA-DR) scFv as set forth in SEQ ID NO:122, the VL region of BMA031 (anti-TCR) scFv as set forth in SEQ ID NO:829, the VL region of OKT3-M (anti-CD3) scFv as set forth in SEQ ID NO:833, and the VL region of HuM291 (anti-CD3) scFv as set forth in SEQ ID NO:836. The nucleotide sequences encoding the VL regions of the A2 (anti-hyperIL-6) and 3D1 (anti-CD86) scFv's are set forth in SEQ ID NOS:83 and 95, respectively.

[0158] In some embodiments, a binding domain is a single chain Fv fragment (scFv) that comprises V_{H} and V_{L} domains specific for a TCR complex or a component thereof. In certain embodiments, the V_{H} and V_{L} domains are human or humanized V_{H} and V_{L} domains. Exemplary V_{H} domains include BC3 (anti-CD3) V_{H}, OKT3 (anti-CD3) V_{H}, H57 (anti-TCR) V_{H}, and 2C11 (anti-CD3) V_{H} domains as set forth in SEQ ID NOS:301, 303, 313, and 317, respectively. Further exemplary V_{H} domains include Cris-7 (anti-CD3) V_{H} domains, such as those set forth in SEQ ID NOS:327 and 331-333. Exemplary V_{L} domains are BC3 (anti-CD3) V_{L}, OKT3 (anti-CD3) V_{L}, H57 (anti-TCR) V_{L}, and 2C11 (anti-CD3) V_{L} domains as set forth in SEQ ID NOS:302, 304, 315 and 318, respectively. Further exemplary V_{L} domains include Cris-7 (anti-CD3) V_{L} domains, such as those set forth in SEQ ID NOS:328, 329 and 330.

[0159] In certain embodiments, a binding domain comprises or is a sequence that is at least 90%, at least 91%, at least 92%, at least 93%, at least 94%, at least 95%, at least 96%, at least 97%, at least 98%, at least 99%, at least 99.5%, or 100% identical to an amino acid sequence of a light chain variable region (V_{L}) or to a heavy chain variable region (V_{H}), or both, wherein each CDR comprises zero changes or at most one, two, or three changes, from a monoclonal antibody or fragment or derivative thereof that specifically binds to a target of interest (e.g., c-Met, RON, CD28, CD79b, CD3ε, TCRα, TCRβ, hyper IL-6, CD86, CD19, and HLA-DR) and such mutant or derivative still binds its target.

[0160] In certain embodiments, a binding domain VH or VL region of the present disclosure can be derived from or based on a VH or VL of a known monoclonal antibody and contains one or more (e.g., 2, 3, 4, 5, 6, 7, 8, 9, 10) insertions, one or more (e.g., 2, 3, 4, 5, 6, 7, 8, 9, 10) deletions, one or more (e.g., 2, 3, 4, 5, 6, 7, 8, 9, 10) amino acid substitutions (e.g., conservative amino acid substitutions or non-conservative amino acid substitutions), or a combination of the above-noted changes, when compared with the VH or VL of a known monoclonal antibody. The insertion(s), deletion(s) or substitution(s) may be anywhere in the VH region, including at the amino- or carboxy-terminus or both ends of this region, provided that each CDR comprises zero changes or at most one, two, or three changes and provided that a binding domain containing the modified VH or VL region can still specifically bind its target with an affinity about the same as the wild type binding domain.

[0161] The VH and VL domains may be arranged in either orientation (i.e., from amino-terminus to carboxyl terminus, VH-VL or VL-VH) and may be joined by an amino acid sequence (e.g., having a length of about five to about 35 amino acids) capable of providing a spacer function such that the two sub-binding domains can interact to form a functional binding domain. In certain embodiments, an amino acid sequence that joins the VH and VL domains (also referred to herein as a “linker”) includes those belonging to the (GlyₙSer) family, such as (Gly₃Ser)ₙ(Gly₄Ser)₁, (Gly₃Ser)₁(Gly₄Ser)ₙ, (Gly₃Ser)ₙ(Gly₄Ser)ₙ, or (Gly₄Ser)ₙ, wherein n is an integer of 1 to 5. In certain embodiments, the linker is GGGGSGGGGS GGGGS (SEQ ID NO:183) or GGGGSGGGGSGGGGSGGGGS (SEQ ID NO:108). An additional exemplary linker is GGGGSGGGGSGGGGAS (SEQ ID NO:739). In certain embodiments, these (GlyₙSer)-based linkers are used to link the VH and VL domains in a binding domain, but are not used to link a binding domain to an immunoglobulin heterodimerization domain or to an Fc region portion.

[0162] Exemplary binding domains specific for CD28 include a 2E12 scFv as set forth in SEQ ID NO:109, binding domains specific for CD79b include a P2C2 scFv as set forth in SEQ ID NO:185; binding domains specific for c-Met include a 5D5 scFv as set forth in SEQ ID NO:257; binding domains specific for RON include a 4C04 scFv as set forth in SEQ ID NO:261 and a 11H09 scFv as set forth in SEQ ID NO:265; binding domains specific for hyperIL-6 include an A2 scFv as set forth in SEQ ID NO:86; binding domains specific for CD86 include a 3D1 scFv as set forth in SEQ ID NO:98; binding domains specific for HLA-DR include an M0042 scFv as set forth in SEQ ID NO:120; binding domains specific for CD3 include a G19-4 scFv as set forth in SEQ ID NO:102, an OKT3-M scFv as set forth in SEQ ID NO:834, and a HuM291 scFv as set forth in SEQ ID NO:837; binding domain specific for CD19 include a H37 scFv as set forth in SEQ ID NO:105; and binding domains specific for c-Met include an MET021 scFv as set forth in SEQ ID NO:120 (with the light chain CDR1, CDR2, CDR3 and heavy chain CDR1, CDR2 and CDR3 as set forth in SEQ ID NOS:296-298 and 464-466, respectively). The nucleotide sequences encoding the A2 (anti-hyperIL6) and 3D1 (anti-CD86) scFv's are set forth in SEQ ID NOS:85 and 97, respectively. Exemplary binding domains that bind a TCR complex or a component thereof include a BMA031 scFv as set forth in SEQ ID NO:830 and other scFv's as set forth in SEQ ID NOS:310, 311, 312, 319, and 334-340.

[0163] Additional exemplary binding domains include a PDL2 ectodomain as set forth in SEQ ID NO:88 and monoIL-10 as set forth in SEQ ID NO:90. The nucleotide sequences encoding the PDL2 ectodomain and monoIL-10 are set forth in SEQ ID NOS:87 and 89, respectively.

[0164] The light chain amino acid sequence of the 4C04 (anti-RON) scFv is set forth in SEQ ID NO:602, and its CDR1, CDR2, and CDR3 are set forth in SEQ ID NOS:604-606, respectively. The heavy chain amino acid sequence of the 4C04 (anti-RON) scFv is set forth in SEQ ID NO:603, and its CDR1, CDR2, and CDR3 are set forth in SEQ ID NOS:607-609, respectively.

[0165] The light chain amino acid sequence of the 11H09 (anti-RON) scFv is set forth in SEQ ID NO:610, and its CDR1, CDR2, and CDR3 are set forth in SEQ ID NOS:612-614, respectively. The heavy chain amino acid sequence of the 11H09 (anti-RON) scFv is set forth in SEQ ID NO:611, and its CDR1, CDR2, and CDR3 are set forth in SEQ ID NOS:615-617, respectively.

[0166] A binding domain may be located either at amino terminal or carboxyl terminal to the Fc region portion of a single chain polypeptide of the present disclosure. In certain embodiments, the binding domain is located at the amino terminus of a single chain polypeptide. In certain other embodiments, the binding domain is located at the carboxyl terminus of a single chain polypeptide. In certain other embodiments, a binding domain is located at both the amino and carboxyl terminus of a single chain polypeptide.

[0167] Heterodimerization Domains

[0168] As indicated above, a polypeptide heterodimer of the present disclosure comprises an immunoglobulin heterodimerization domain in each polypeptide chain. The immunoglobulin heterodimerization domains in the two single chain polypeptides of a polypeptide heterodimer are different from each other and thus may be differentially modified to facilitate heterodimerization of both chains and to minimize homodimerization of either chain. As shown in the examples, immunoglobulin heterodimerization domains provided herein allow for efficient heterodimerization between different polypeptides and facilitate purification of the resulting polypeptide heterodimers.

[0169] As provided herein, immunoglobulin heterodimerization domains useful for promoting heterodimerization of two different single chain polypeptides (e.g., one short and one long) according to the present disclosure include immunoglobulin CH1 and CL domains, for instance, human CH1 and CL domains. In certain embodiments, an immunoglobulin heterodimerization domain is a wild type CH1 region, such as a wild type IgG1, IgG2, IgG3, IgG4, IgA1, IgA2, IgD, IgE, or IgM CH1 region. In further embodiments, an immunoglobulin heterodimerization domain is a wild type human IgG1, IgG2, IgG3, IgG4, IgA1, IgA2, IgD, IgE, or IgM CH1 region as set forth in SEQ ID NOS:114, 186-192 and 194, respectively. In certain embodiments, an immunoglobulin heterodimerization domain is a wild type human IgG1 CH1 region as set forth in SEQ ID NO:114.

[0170] In further embodiments, an immunoglobulin heterodimerization domain is an altered immunoglobulin CH1 region, such as an altered IgG1, IgG2, IgG3, IgG4, IgA1, IgA2 IgD, IgE, or IgM CH1 region. In certain embodiments, an immunoglobulin heterodimerization domain is an altered human IgG1, IgG2, IgG3, IgG4, IgA1, IgA2, IgD, IgE, or IgM CH1 region. In still further embodiments, a cysteine residue of a wild type CH1 region (e.g., a human CH1) involved in forming a disulfide bond with a wild type immunoglobulin CL domain (e.g., a human CL) is deleted or substituted in the altered immunoglobulin CH1 region such that a disulfide bond is not formed between the altered CH1 region and the wild type CL domain.

[0171] In certain embodiments, an immunoglobulin heterodimerization domain is a wild type CL domain, such as a wild type Cκ domain or a wild type Cλ domain. In particular embodiments, an immunoglobulin heterodimerization domain is a wild type human Cκ or human Cλ domain as set forth in SEQ ID NOS:112 and 113, respectively. In further embodiments, an immunoglobulin heterodimerization domain is an altered immunoglobulin CL domain, such as an altered Cκ or Cλ domain, for instance, an altered human Cκ or human Cλ domain.

[0172] In certain embodiments, a cysteine residue of a wild type CL domain (e.g., a human CL) involved in forming a disulfide bond with a wild type immunoglobulin CH1 region (e.g., a human CH1) is deleted or substituted in the altered immunoglobulin CL domain. Such altered CL domains may further comprise an amino acid deletion at their amino termini. An exemplary Cκ domain is set forth in SEQ ID NO:141, in which the first arginine and the last cysteine of the wild type human Ck domain are both deleted. In certain embodiments, only the last cysteine of the wild type human Ck domain is deleted in the altered Ck domain because the first arginine deleted from the wild type human Ck domain may be provided by a linker that has an arginine at its carboxyl terminus and links the amino terminus of the altered Ck domain with another domain (e.g., an Fc region portion). An exemplary Cλ domain is set forth in SEQ ID NO:140, in which the first arginine of a wild type human Cλ domain is deleted and the cysteine involved in forming a disulfide bond with a cysteine in a CH1 region is substituted by a serine.

[0173] In further embodiments, an immunoglobulin heterodimerization domain is an altered Cκ domain that contains one or more amino acid substitutions, as compared to a wild type Cκ domain, at positions that may be involved in forming the interchain-hydrogen bond network at a Cκ-Cκ interface. For example, in certain embodiments, an immunoglobulin heterodimerization domain is an altered human Cκ domain having one or more amino acids at positions N29, N30, Q52, V55, T56, S68 or T70 that are substituted with a different amino acid. The numbering of the amino acids is based on their positions in the altered human Cκ sequence as set forth in SEQ ID NO:141. In certain embodiments, an immunoglobulin heterodimerization domain is an altered human Cκ domain having one, two, three or four amino acid substitutions at positions N29, N30, V55, or T70. The amino acid used as a substitute at the above-noted positions may be an alanine, or an amino acid residue with a bulk side chain moiety such as arginine, tryptophan, tyrosine, glutamate, glutamine, or lysine. Additional amino acid residues that may be used to substitute amino acid residues of the wild type human Ck sequence at the above noted positions (e.g., N30) include aspartate, methionine, serine and phenyalanine. Exemplary altered human Cκ domains are set forth in SEQ ID NOS:142-178. Altered human Cκ domains are those that facilitate heterodimerization with a CH1 region, but minimize homodimerization with another Cκ domain. Representative altered human Cκ domains are set forth in SEQ ID NOS:160 (N29W V55A T70A), 161 (N29Y V55A T70A), 202 (T70E N29A N30A V55A), 167 (N30R V55A T70A), 168 (N30K V55A T70A), 170 (N30E V55A T70A), 172 (V55R N29A N30A), 175 (N29W N30Y V55A T70E), 176 (N29Y N30Y V55A T70E), 177 (N30E V55A T70E), 178 (N30Y V55A T70E), 838 (N30D V55A T70E), 839 (N30M V55A T70E), 840 (N30S V55A T70E), and 841 (N30F V55A T70E).

[0174] In certain embodiments, in addition to or alternative to the mutations in Ck domains described herein, both the immunoglobulin heterodimerization domains (i.e., immunoglobulin CH1 and CL domains) of a polypeptide heterodimer have mutations so that the resulting immunoglobulin heterodimerization domains form salt bridges (i.e., ionic interactions) between the amino acid residues at the mutated sites. For example, the immunoglobulin heterodimerization domains of a polypeptide heterodimer may be a mutated CH1 domain in combination with a mutated Ck domain. In the mutated CH1 domain, valine at position 68 (V68) of the wild type human CH1 domain is substituted by an amino acid residue having a negative charge (e.g., aspartate or glutamate), whereas leucine at position 29 (L29) of a mutated human Ck domain in which the first arginine and the last cysteine have been deleted is substituted by an amino acid residue having a positive charge (e.g., lysine, arginine or histidine). The charge-charge interaction between the amino acid residue having a negative charge of the resulting mutated CH1 domain and the amino acid residue having a positive charge of the resulting mutated Ck domain forms a salt bridge, which stabilizes the heterodimeric interface between the mutated CH1 and Ck domains. Alternatively, V68 of the wild type CH1 may be substituted by an amino acid residue having a positive charge, whereas L29 of a mutated human Ck domain in which the first arginine and the last cysteine have been deleted may be substituted by an amino acid residue having a negative charge. Exemplary mutated CH1 sequences in which V68 is substituted by an amino acid with either a negative or positive charge are set forth in SEQ ID NOS:844 and 845. Exemplary mutated Ck sequences in which L29 is substituted by an amino acid with either a negative or positive charge are set forth in SEQ ID NOS:842 and 843.

[0175] Positions other than V68 of human CH1 domain and L29 of human Ck domain may be substituted with amino acids having opposite charges to produce ionic interactions between the amino acids in addition or alternative to the mutations in V68 of CH1 domain and L29 of Ck domain. Such positions can be identified by any suitable method, including random mutagenesis, analysis of the crystal structure of the CH1-Ck pair to identify amino acid residues at the CH1-Ck interface, and further identifying suitable positions among the amino acid residues at the CH1-Ck interface using a set of criteria (e.g., propensity to engage in ionic interactions, proximity to a potential partner residue, etc.).

[0176] In certain embodiments, polypeptide heterodimers of the present disclosure contain only one pair of immunoglobulin heterodimerization domains. For example, a first chain of a polypeptide heterodimer may comprise a CH1 region as an immunoglobulin heterodimerization domain, while a second chain may comprise a CL domain (e.g., a Cκ or Cλ) as an immunoglobulin heterodimerization domain. Alternatively, a first chain may comprise a CL region (e.g., a Cκ or Cλ) as an immunoglobulin heterodimerization domain, while a second chain may comprise a CH1 region as an immunoglobulin heterodimerization domain. As set forth herein, the immunoglobulin heterodimerization domains of the first and second chains are capable of associating to form a polypeptide heterodimer of this disclosure.

[0177] In certain other embodiments, polypeptide heterodimers of the present disclosure may have two pairs of immunoglobulin heterodimerization domains. For example, a first chain of a polypeptide heterodimer may comprise two CH1 regions, while a second chain may have two CL domains that associate with the two CH1 regions in the first chain. Alternatively, a first chain may comprise two CL domains, while a second chain may have two CH1 regions that associate with the two CL domains in the first chain. In certain embodiments, a first chain polypeptide comprises a CH1 region and a CL domain, while a second chain polypeptide comprises a CL domain and a CH1 region that associate with the CH1 region and the CL domain, respectively, of the first chain polypeptide.

[0178] In the embodiments where a polypeptide heterodimer comprises only one heterodimerization pair (i.e., one immunoglobulin heterodimerization domain in each chain), the immunoglobulin heterodimerization domain of each chain may be located amino terminal to the Fc region portion of that chain. Alternatively, the immunoglobulin heterodimerization domain in each chain may be located carboxyl terminal to the Fc region portion of that chain.

[0179] In the embodiments where a polypeptide heterodimer comprises two heterodimerization pairs (i.e., two immunoglobulin heterodimerization domains in each chain), both immunoglobulin heterodimerization domains in each chain may be located amino terminal to the Fc region portion of that chain. Alternatively, both immunoglobulin heterodimerization domains in each chain may be located carboxyl terminal to the Fc region portion of that chain. In further embodiments, one immunoglobulin heterodimerization domain in each chain may be located amino terminal to the Fc region portion of that chain, while the other immunoglobulin heterodimerization domain of each chain may be located carboxyl terminal to the Fc region portion of that chain. In other words, in those embodiments, the Fc region portion is interposed between the two immunoglobulin heterodimerization domains of each chain.

[0180] Fc Region Portion

[0181] As indicated herein, polypeptide heterodimers of the present disclosure comprise an Fc region constant domain portion (also referred to as an Fc region portion) in each polypeptide chain. The inclusion of an Fc region portion slows clearance of the heterodimers from circulation after administration to a subject. By mutations or other alterations, the Fc region portion further enables relatively easy modulation of heterodimer polypeptide effector functions (e.g., ADCC, ADCP, CDC, complement fixation and binding to Fc receptors), which can either be increased or decreased depending on the disease being treated, as known in the art and described herein. In certain embodiments, an Fc region portion of polypeptide heterodimers of the present disclosure will be capable of mediating one or more of these effector functions.

[0182] An Fc region portion present in single chain polypeptides that form part of the polypeptide heterodimers of the present disclosure may comprise a CH2 domain, a CH3 domain, a CH4 domain or any combination thereof. For example, an Fc region portion may comprise a CH2 domain, a CH3 domain, both CH2 and CH3 domains, both CH3 and CH4 domains, two CH3 domains, a CH4 domain, or two CH4 domains.

[0183] A CH2 domain that may form an Fc region portion of a single chain polypeptide of a heterodimer of the present disclosure may be a wild type immunoglobulin CH2 domain or an altered immunoglobulin CH2 domain thereof from certain immunoglobulin classes or subclasses (e.g., IgG1, IgG2, IgG3, IgG4, IgA1, IgA2, or IgD) and from various species (including human, mouse, rat, and other mammals).

[0184] In certain embodiments, a CH2 domain is a wild type human immunoglobulin CH2 domain, such as wild type CH2 domains of human IgG1, IgG2, IgG3, IgG4, IgA1, IgA2, or IgD, as set forth in SEQ ID NOS:115, 199-201 and 195-197, respectively. In certain embodiments, the CH2 domain is a wild type human IgG1 CH2 domain as set forth in SEQ ID NO:115.

[0185] In certain embodiments, a CH2 domain is an altered immunoglobulin CH2 region (e.g., an altered human IgG1 CH2 domain) that comprises an amino acid substitution at the asparagine of position 297 (e.g., asparagine to alanine). Such an amino acid substitution reduces or eliminates glycosylation at this site and abrogates efficient Fc binding to FcγR and C1q. The sequence of an altered human IgG1 CH2 domain with an Asn to Ala substitution at position 297 is set forth in SEQ ID NO:324.

[0186] In certain embodiments, a CH2 domain is an altered immunoglobulin CH2 region (e.g., an altered human IgG1 CH2 domain) that comprises at least one substitution or deletion at positions 234 to 238. For example, an immunoglobulin CH2 region can comprise a substitution at position 234, 235, 236, 237 or 238, positions 234 and 235, positions 234 and 236, positions 234 and 237, positions 234 and 238, positions 234-236, positions 234, 235 and 237, positions 234, 236 and 238, positions 234, 235, 237, and 238, positions 236-238, or any other combination of two, three, four, or five amino acids at positions 234-238. In addition or alternatively, an altered CH2 region may comprise one or more (e.g., two, three, four or five) amino acid deletions at positions 234-238, for instance, at one of position 236 or position 237 while the other position is substituted. The above-noted mutation(s) decrease or eliminate the antibody-dependent cell-mediated cytotoxicity (ADCC) activity or Fc receptor-binding capability of a polypeptide heterodimer that comprises the altered CH2 domain. In certain embodiments, the amino acid residues at one or more of positions 234-238 has been replaced with one or more alanine residues. In further embodiments, only one of the amino acid residues at positions 234-238 have been deleted while one or more of the remaining amino acids at positions 234-238 can be substituted with another amino acid (e.g., alanine or serine).

[0187] In certain other embodiments, a CH2 domain is an altered immunoglobulin CH2 region (e.g., an altered human IgG1 CH2 domain) that comprises one or more amino acid substitutions at positions 253, 310, 318, 320, 322, and 331. For example, an immunoglobulin CH2 region can comprise a substitution at position 253, 310, 318, 320, 322, or 331, positions 318 and 320, positions 318 and 322, positions 318, 320 and 322, or any other combination of two, three, four, five or six amino acids at positions 253, 310, 318, 320, 322, and 331. The above-noted mutation(s) decrease or eliminate the complement-dependent cytotoxicity (CDC) of a polypeptide heterodimer that comprises the altered CH2 domain.

[0188] In certain other embodiments, in addition to the amino acid substitution at position 297, an altered CH2 region (e.g., an altered human IgG1 CH2 domain) can further comprise one or more (e.g., two, three, four, or five) additional substitutions at positions 234-238. For example, an immunoglobulin CH2 region can comprise a substitution at positions 234 and 297, positions 234, 235, and 297, positions 234, 236 and 297, positions 234-236 and 297, positions 234, 235, 237 and 297, positions 234, 236, 238 and 297, positions 234, 235, 237, 238 and 297, positions 236-238 and 297, or any combination of two, three, four, or five amino acids at positions 234-238 in addition to position 297. In addition or alternatively, an altered CH2 region may comprise one or more (e.g., two, three, four or five) amino acid deletions at positions 234-238, such as at position 236 or position 237. The additional mutation(s) decreases or eliminates the antibody-dependent cell-mediated cytotoxicity (ADCC) activity or Fc receptor-binding capability of a polypeptide heterodimer that comprises the altered CH2 domain. In certain embodiments, the amino acid residues at one or more of positions 234-238 have been replaced with one or more alanine residues. In further embodiments, only one of the amino acid residues at positions 234-238 has been deleted while one or more of the remaining amino acids at positions 234-238 can be substituted with another amino acid (e.g., alanine or serine).

[0189] In certain embodiments, in addition to one or more (e.g., 2, 3, 4, or 5) amino acid substitutions at positions 234-238, a mutated CH2 region (e.g., an altered human IgG1 CH2 domain) in a fusion protein of the present disclosure may contain one or more (e.g., 2, 3, 4, 5, or 6) additional amino acid substitutions (e.g., substituted with alanine) at one or more positions involved in complement fixation (e.g., at positions 1253, H310, E318, K320, K322, or P331). Examples of mutated immunoglobulin CH2 regions include human IgG1, IgG2, IgG4 and mouse IgG2a CH2 regions with alanine substitutions at positions 234, 235, 237 (if present), 318, 320 and 322. An exemplary mutated immunoglobulin CH2 region is mouse IGHG2c CH2 region with alanine substitutions at L234, L235, G237, E318, K320, and K322 (SEQ ID NO:314).

[0190] In still further embodiments, in addition to the amino acid substitution at position 297 and the additional deletion(s) or substitution(s) at positions 234-238, an altered CH2 region (e.g., an altered human IgG1 CH2 domain) can further comprise one or more (e.g., two, three, four, five, or six) additional substitutions at positions 253, 310, 318, 320, 322, and 331. For example, an immunoglobulin CH2 region can comprise a (1) substitution at position 297, (2) one or more substitutions or deletions or a combination thereof at positions 234-238, and one or more (e.g., 2, 3, 4, 5, or 6) amino acid substitutions at positions 1253, H310, E318, K320, K322, and P331, such as one, two, three substitutions at positions E318, K320 and K322. The amino acids at the above-noted positions may be substituted by alanine or serine.

[0191] In certain embodiments, an immunoglobulin CH2 region polypeptide comprises: (i) an amino acid substitution at the asparagines of position 297 and one amino acid substitution at position 234, 235, 236 or 237; (ii) an amino acid substitution at the asparagine of position 297 and amino acid substitutions at two of positions 234-237; (iii) an amino acid substitution at the asparagine of position 297 and amino acid substitutions at three of positions 234-237; (iv) an amino acid substitution at the asparagine of position 297, amino acid substitutions at positions 234, 235 and 237, and an amino acid deletion at position 236; (v) amino acid substitutions at three of positions 234-237 and amino acid substitutions at positions 318, 320 and 322; or (vi) amino acid substitutions at three of positions 234-237, an amino acid deletion at position 236, and amino acid substitutions at positions 318, 320 and 322.

[0192] Exemplary altered immunoglobulin CH2 regions with amino acid substitutions at the asparagine of position 297 include: human IgG1 CH2 region with alanine substitutions at L234, L235, G237 and N297 and a deletion at G236 (SEQ ID NO:325), human IgG2 CH2 region with alanine substitutions at V234, G236, and N297 (SEQ ID NO:326), human IgG4 CH2 region with alanine substitutions at F234, L235, G237 and N297 and a deletion of G236 (SEQ ID NO:322), human IgG4 CH2 region with alanine substitutions at F234 and N297 (SEQ ID NO:343), human IgG4 CH2 region with alanine substitutions at L235 and N297 (SEQ ID NO:344), human IgG4 CH2 region with alanine substitutions at G236 and N297 (SEQ ID NO:345), and human IgG4 CH2 region with alanine substitutions at G237 and N297 (SEQ ID NO:346).

[0193] In certain embodiments, in addition to the amino acid substitutions described above, an altered CH2 region (e.g., an altered human IgG1 CH2 domain) may contain one or more additional amino acid substitutions at one or more positions other than the above-noted positions. Such amino acid substitutions may be conservative or non-conservative amino acid substitutions. For example, in certain embodiments, P233 may be changed to E233 in an altered IgG2 CH2 region (see, e.g., SEQ ID NO:326). In addition or alternatively, in certain embodiments, the altered CH2 region may contain one or more amino acid insertions, deletions, or both. The insertion(s), deletion(s) or substitution(s) may anywhere in an immunoglobulin CH2 region, such as at the N- or C-terminus of a wild type immunoglobulin CH2 region resulting from linking the CH2 region with another region (e.g., a binding domain or an immunoglobulin heterodimerization domain) via a hinge.

[0194] In certain embodiments, an altered CH2 region in a polypeptide heterodimer of the present disclosure comprises or is a sequence that is at least 90%, at least 91%, at least 92%, at least 93%, at least 94%, at least 95%, at least 96%, at least 97%, at least 98%, at least 99% identical to a wild type immunoglobulin CH2 region, such as the CH2 region of wild type human IgG1, IgG2, or IgG4, or mouse IgG2a (e.g., IGHG2c).

[0195] An altered immunoglobulin CH2 region in a polypeptide heterodimer of the present disclosure may be derived from a CH2 region of various immunoglobulin isotypes, such as IgG1, IgG2, IgG3, IgG4, IgA1, IgA2, and IgD, from various species (including human, mouse, rat, and other mammals). In certain embodiments, an altered immunoglobulin CH2 region in a fusion protein of the present disclosure may be derived from a CH2 region of human IgG1, IgG2 or IgG4, or mouse IgG2a (e.g., IGHG2c), whose sequences are set forth in SEQ ID NOS:115, 199, 201 and 320.

[0196] In certain embodiments, an altered CH2 domain is a human IgG1 CH2 domain with alanine substitutions at positions 235, 318, 320, and 322 (i.e., a human IgG1 CH2 domain with L235A, E318A, K320A and K322A substitutions) (SEQ ID NO:595), and optionally an N297 mutation (e.g., to alanine). In certain other embodiments, an altered CH2 domain is a human IgG1 CH2 domain with alanine substitutions at positions 234, 235, 237, 318, 320 and 322 (i.e., a human IgG1 CH2 domain with L234A, L235A, G237A, E318A, K320A and K322A substitutions) (SEQ ID NO:596), and optionally an N297 mutation (e.g., to alanine)

[0197] In certain embodiments, an altered CH2 domain is an altered human IgG1 CH2 domain with mutations known in the art that enhance immunological activities such as ADCC, ADCP, CDC, complement fixation, Fc receptor binding, or any combination thereof.

[0198] The CH3 domain that may form an Fc region portion of a single chain polypeptide of a heterodimer of the present disclosure may be a wild type immunoglobulin CH3 domain or an altered immunoglobulin CH3 domain thereof from certain immunoglobulin classes or subclasses (e.g., IgG1, IgG2, IgG3, IgG4, IgA1, IgA2, IgD, IgE, IgM) of various species (including human, mouse, rat, and other mammals). In certain embodiments, a CH3 domain is a wild type human immunoglobulin CH3 domain, such as wild type CH3 domains of human IgG1, IgG2, IgG3, IgG4, IgA1, IgA2, IgD, IgE, or IgM as set forth in SEQ ID NOS:116, 208-210, 204-207, and 212, respectively. In certain embodiments, the CH3 domain is a wild type human IgG1 CH3 domain as set forth in SEQ ID NO:116. In certain embodiments, a CH3 domain is an altered human immunoglobulin CH3 domain, such as an altered CH3 domain based on or derived from a wild-type CH3 domain of human IgG1, IgG2, IgG3, IgG4, IgA1, IgA2, IgD, IgE, or IgM antibodies. For example, an altered CH3 domain may be a human IgG1 CH3 domain with one or two mutations at positions H433 and N434 (positions are numbered according to EU numbering). The mutations in such positions may be involved in complement fixation. In certain other embodiments, an altered CH3 domain may be a human IgG1 CH3 domain but with one or two amino acid substitutions at position F405 or Y407. The amino acids at such positions are involved in interacting with another CH3 domain. In certain embodiments, an altered CH3 domain may be an altered human IgG1 CH3 domain with its last lysine deleted. The sequence of this altered CH3 domain is set forth in SEQ ID NO:761.

[0199] In certain embodiments, a polypeptide heterodimer comprises a CH3 pair that comprises so called “knobs-into-holes” mutations (see, Marvin and Zhu, Acta Pharmacologica Sinica 26:649-58, 2005; Ridgway et al., Protein Engineering 9:617-21, 1966). More specifically, mutations may be introduced into each of the two CH3 domains so that the steric complementarity required for CH3/CH3 association obligates these two CH3 domains to pair with each other. For example, a CH3 domain in one single chain polypeptide of a polypeptide heterodimer may contain a T366W mutation (a “knob” mutation, which substitutes a small amino acid with a larger one), and a CH3 domain in the other single chain polypeptide of the polypeptide heterodimer may contain a Y407A mutation (a “hole” mutation, which substitutes a large amino acid with a smaller one). Other exemplary knobs-into-holes mutations include (1) a T366Y mutation in one CH3 domain and a Y407T in the other CH3 domain, and (2) a T366W mutation in one CH3 domain and T366S, L368A and Y407V mutations in the other CH3 domain.

[0200] The CH4 domain that may form an Fc region portion of a single chain polypeptide of a heterodimer of the present disclosure may be a wild type immunoglobulin CH4 domain or an altered immunoglobulin CH4 domain thereof from IgE or IgM molecules. In certain embodiments, the CH4 domain is a wild type human immunoglobulin CH4 domain, such as wild type CH4 domains of human IgE and IgM molecules as set forth in SEQ ID NOS:213 and 214, respectively. In certain embodiments, a CH4 domain is an altered human immunoglobulin CH4 domain, such as an altered CH4 domain based on or derived from a CH4 domain of human IgE or IgM molecules, which have mutations that increase or decrease an immunological activity known to be associated with an IgE or IgM Fc region.

[0201] In certain embodiments, an Fc region constant domain portion in heterodimers of the present disclosure comprises a combination of CH2, CH3 or CH4 domains (i.e., more than one constant sub-domain selected from CH2, CH3 and CH4). For example, the Fc region portion may comprise CH2 and CH3 domains or CH3 and CH4 domains. In certain other embodiments, the Fc region portion may comprise two CH3 domains and no CH2 or CH4 domains (i.e., only two or more CH3). The multiple constant sub-domains that form an Fc region portion may be based on or derived from the same immunoglobulin molecule, or the same class or subclass immunoglobulin molecules. In certain embodiments, the Fc region portion is an IgG CH2CH3 (e.g., IgG1 CH2CH3, IgG2 CH2CH3, and IgG4 CH2CH3) and may be a human (e.g., human IgG1, IgG2, and IgG4) CH2CH3. For example, in certain embodiments, the Fc region portion comprises (1) wild type human IgG1 CH2 and CH3 domains, (2) human IgG1 CH2 with N297A substitution (i.e., CH2(N297A)) and wild type human IgG1 CH3, or (3) human IgG1 CH2(N297A) and an altered human IgG1 CH3 with the last lysine deleted.

[0202] Alternatively, the multiple constant sub-domains may be based on or derived from different immunoglobulin molecules, or different classes or subclasses immunoglobulin molecules. For example, in certain embodiments, an Fc region portion comprises both human IgM CH3 domain and human IgG1 CH3 domain. The multiple constant sub-domains that form an Fc region portion may be directly linked together or may be linked to each other via one or more (e.g., about 2-10) amino acids.

[0203] Exemplary Fc region portions are set forth in SEQ ID NOS:305-309, 321, 323, 341, 342, and 762.

[0204] In certain embodiments, the Fc region portions of both single chain polypeptides of a polypeptide heterodimer are identical to each other. In certain other embodiments, the Fc region portion of one single chain polypeptide of a polypeptide heterodimer is different from the Fc region portion of the other single chain polypeptide of the heterodimer. For example, one Fc region portion may contain a CH3 domain with a “knob” mutation, whereas the other Fc region portion may contain a CH3 domain with a “hole” mutation.

[0205] Hinge

[0206] A hinge region contained in a single chain polypeptide of a polypeptide heterodimer according to the present disclosure may be located (a) immediately amino terminal to an Fc region portion (e.g., depending on the isotype, amino terminal to a CH2 domain wherein the Fc region portion is a CH2CH3, or amino terminal to a CH3 domain wherein the Fc region portion is a CH3CH4), (b) interposed between and connecting a binding domain (e.g., scFv) and an immunoglobulin heterodimerization domain, (c) interposed between and connecting an immunoglobulin heterodimerization domain and an Fc region portion (e.g., wherein the Fc region portion is a CH2CH3 or a CH3CH4, depending on the isotype or isotypes), (d) interposed between and connecting an Fc region portion and a binding domain, (e) at the amino terminus of the single chain polypeptide, or (f) at the carboxyl terminus of the single chain polypeptide. The single chain polypeptide comprising a hinge region as described herein will be capable of associating with a different single chain fusion polypeptide to form a polypeptide heterodimer provided herein, and the polypeptide heterodimer formed will contain a binding domain that retains its target specificity or its specific target binding affinity.

[0207] In certain embodiments, a hinge present in a single chain polypeptide that forms a polypeptide heterodimer with another single chain polypeptide may be an immunoglobulin hinge region, such as a wild type immunoglobulin hinge region or an altered immunoglobulin hinge region thereof.

[0208] In certain embodiments, a hinge is a wild type human immunoglobulin hinge region (e.g., human immunoglobulin hinge regions as set forth in SEQ ID NOS:215-221). In certain other embodiments, one or more amino acid residues may be added at the amino- or carboxy-terminus of a wild type immunoglobulin hinge region as part of a fusion protein construct design. For example, additional junction amino acid residues at the hinge amino-terminus can be “RT,” “RSS,” “TG,” or “T”, or at the hinge carboxy-terminus can be “SG”, or a hinge deletion can be combined with an addition, such as ΔP with “SG” added at the carboxyl terminus.

[0209] In certain embodiments, a hinge is an altered immunoglobulin hinge in which one or more cysteine residues in a wild type immunoglobulin hinge region is substituted with one or more other amino acid residues (e.g., serine or alanine). For example, a hinge may be an altered immunoglobulin hinge based on or derived from a wild type human IgG1 hinge as set forth in SEQ ID NO:667, which from amino terminus to carboxyl terminus comprises the upper hinge region (EPKSCDKTHT, SEQ ID NO:227) and the core hinge region (CPPCP, SEQ ID NO:228). Exemplary altered immunoglobulin hinges include an immunoglobulin human IgG1 hinge region having one, two or three cysteine residues found in a wild type human IgG1 hinge substituted by one, two or three different amino acid residues (e.g., serine or alanine). An altered immunoglobulin hinge may additionally have a proline substituted with another amino acid (e.g., serine or alanine). For example, the above-described altered human IgG1 hinge may additionally have a proline located carboxyl terminal to the three cysteines of wild type human IgG1 hinge region substituted by another amino acid residue (e.g., serine, alanine). In one embodiment, the prolines of the core hinge region are not substituted. Exemplary altered immunoglobulin hinges are set forth in SEQ ID NOS: 229-240, 255, 664-677, and 748-759. An example of an altered IgG1 hinge is an altered human IgG1 hinge in which the first cysteine is substituted by serine. The sequence of this altered IgG1 hinge is set forth in SEQ ID NO:664, and is referred to as the “human IgG1 SCC-P hinge” or “SCC-P hinge.” In certain embodiments, one or more amino acid residues (e.g., “RT,” “RSS,” or “T”) may be added at the amino- or carboxy-terminus of a mutated immunoglobulin hinge region as part of a fusion protein construct design.

[0210] In certain embodiments, a hinge polypeptide comprises or is a sequence that is at least 80%, at least 81%, at least 82%, at least 83%, at least 84%, at least 85%, at least 86%, at least 87%, at least 88%, at least 89%, at least 90%, at least 91%, at least 92%, at least 93%, at least 94%, at least 95%, at least 96%, at least 97%, at least 98%, at least 99% identical to a wild type immunoglobulin hinge region, such as a wild type human IgG1 hinge, a wild type human IgG2 hinge, or a wild type human IgG4 hinge.

[0211] In further embodiments, a hinge present in a single chain polypeptide that forms a polypeptide heterodimer with another single chain polypeptide may be a hinge that is not based on or derived from an immunoglobulin hinge (i.e., not a wild type immunoglobulin hinge or an altered immunoglobulin hinge). These types of non-immunoglobulin based hinges may be used on or near the carboxyl end (e.g., located carboxyl terminal to Fc region portions) of the single chain polypeptides that form the polypeptide heterodimers. Examples for such hinges include peptides of about five to about 150 amino acids of the interdomain or stalk region of type II C-lectins or CD molecules, for instance, peptides of about eight to 25 amino acids and peptides of about seven to 18 amino acids, and derivatives thereof.

[0212] The “interdomain or stalk region” of a type II C-lectin or CD molecule refers to the portion of the extracellular domain of the type II C-lectin or CD molecule that is located between the C-type lectin-like domain (CTLD; e.g., similar to CTLD of natural killer cell receptors) and the transmembrane domain. For example, in the human CD94 molecule (GenBank Accession No. AAC50291.1, PRI Nov. 30, 1995), the extracellular domain corresponds to amino acid residues 34-179, whereas the CTLD corresponds to amino acid residues 61-176. Accordingly, the interdomain or stalk region of the human CD94 molecule includes amino acid residues 34-60, which is found between the membrane and the CTLD (see Boyington et al., Immunity 10:75, 1999; for descriptions of other stalk regions, see also Beavil et al., Proc. Nat'l. Acad. Sci. USA 89:753, 1992; and Figdor et al., Nature Rev. Immunol. 2:77, 2002). These type II C-lectin or CD molecules may also have from six to 10 junction amino acids between the stalk region and the transmembrane region or the CTLD. In another example, the 233 amino acid human NKG2A protein (GenBank Accession No. P26715.1, PRI Jun. 15, 2010) has a transmembrane domain ranging from amino acids 71-93 and an extracellular domain ranging from amino acids 94-233. The CTLD is comprised of amino acids 119-231, and the stalk region comprises amino acids 99-116, which is flanked by junctions of five and two amino acids. Other type II C-lectin or CD molecules, as well as their extracellular ligand-bind domains, interdomain or stalk regions, and CTLDs are known in the art (see, e.g., GenBank Accession Nos. NP_{—}001993.2; AAH07037.1, PRI Jul. 15, 2006; NP_{—}001773.1, PRI Jun. 20, 1010; AAL65234.1, PRI Jan. 17, 2002, and CAA04925.1, PRI Nov. 14, 2006, for the sequences of human CD23, CD69, CD72, NKG2A and NKG2D and their descriptions, respectively).

[0213] A “derivative” of an interdomain or stalk region, or fragment thereof, of a type II C-lectin or CD molecule includes an about an eight to about 150 amino acid sequence in which one, two, or three amino acids of the stalk region of a wild type type II C-lectin or CD molecule have a deletion, insertion, substitution, or any combination thereof, for instance, the one or more changes are substitutions or the one or more mutations include only one deletion. In further embodiments, a derivative of an interdomain or stalk region is more resistant to proteolytic cleavage as compared to the wild-type interdomain or stalk region sequence, such as those derived from about eight to about 20 amino acids of NKG2A, NKG2D, CD23, CD64, CD72, or CD94.

[0214] In certain embodiments, interdomain or stalk region hinges have seven to 18 amino acids and can form an α-helical coiled coil structure. In certain embodiments, interdomain or stalk region hinges contain 0, 1, 2, 3, or 4 cysteines. Exemplary interdomain or stalk region hinges are peptide fragments of the interdomain or stalk regions, such as ten to 150 amino acid fragments from the stalk regions of CD69, CD72, CD94, NKG2A and NKG2D, as set forth in SEQ ID NOS:241-244, 716 and 601. Additional exemplary stalk region or interdomain hinges include those as set forth in SEQ ID NOS:78, 734-737, 742-747, and 766-790.

[0215] Alternative hinges that can be used in single chain polypeptides of polypeptide heterodimers are from portions of cell surface receptors (interdomain regions) that connect immunoglobulin V-like or immunoglobulin C-like domains. Regions between Ig V-like domains where the cell surface receptor contains multiple Ig V-like domains in tandem and between Ig C-like domains where the cell surface receptor contains multiple tandem Ig C-like regions are also contemplated as hinges useful in single chain polypeptides of polypeptide heterodimers. In certain embodiments, hinge sequences comprised of cell surface receptor interdomain regions may further contain a naturally occurring or added motif, such as an IgG core hinge sequence that confers one or more disulfide bonds to stabilize the polypeptide heterodimer formation. Examples of hinges include interdomain regions between the Ig V-like and Ig C-like regions of CD2, CD4, CD22, CD33, CD48, CD58, CD66, CD80, CD86, CD150, CD166, and CD244.

[0216] In certain embodiments, hinge sequences have about 5 to 150 amino acids, 5 to 10 amino acids, 10 to 20 amino acids, 20 to 30 amino acids, 30 to 40 amino acids, 40 to 50 amino acids, 50 to 60 amino acids, 5 to 60 amino acids, 5 to 40 amino acids, 8 to 20 amino acids, or 10 to 15 amino acids. The hinge may be primarily flexible, but may also provide more rigid characteristics or may contain primarily α-helical structure with minimal β-sheet structure. The lengths or the sequences of the hinges may affect the binding affinities of the binding domains to which the hinges are directly or indirectly (via another region or domain, such as an immunoglobulin heterodimerization domain) connected as well as one or more activities of the Fc region portions to which the hinges are directly or indirectly connected (see, Examples 9 and 10).

[0217] In certain embodiments, hinge sequences are stable in plasma and serum and are resistant to proteolytic cleavage. The first lysine in the IgG1 upper hinge region may be mutated to minimize proteolytic cleavage, for instance, the lysine may be substituted with methionine, threonine, alanine or glycine, or is deleted (see, e.g., SEQ ID NOS:379-434, which may include junction amino acids at the amino terminus such as RT).

[0218] In some embodiments, hinge sequences may contain a naturally occurring or added motif such as an immunoglobulin hinge core structure CPPCP (SEQ ID NO:228) that confers the capacity to form a disulfide bond or multiple disulfide bonds to stabilize the carboxy-terminus of a molecule. In other embodiments, hinge sequences may contain one or more glycosylation sites.

[0219] Exemplary hinges, including altered immunoglobulin hinges, are set forth in SEQ ID NOS:379-434, 618-749, and 763-791.

[0220] In certain embodiments, a single chain polypeptide of a polypeptide heterodimer according to the present disclosure comprises more than one hinge. For example, a single chain polypeptide having two binding domains, one of which at the amino terminus and the other at the carboxyl terminus, may have two hinges. One hinge may be directly or indirectly (e.g., via an immunoglobulin heterodimerization domain) connected to the binding domain at or near the amino terminus, and the other hinge may be connected (e.g., directly connected) to the other binding domain at or near the carboxyl terminus. In certain embodiments, even if a single chain polypeptide has only one binding domain, it may have more than one hinge, for example, at its amino or carboxyl terminus. Such a hinge may interact with a corresponding hinge in the other chain of the heterodimer, such as forming one or more interchain disulfide bonds, to facilitate or enhance the heterodimerization of the two chains. A hinge (H-I) of a SCP-I of a polypeptide heterodimer “corresponds to” a hinge (H-II) of a SCP-II of the heterodimer when H-I and H-II are located on the same end of the Fc region portion of their respective single chain polypeptide. For example, a polypeptide heterodimer may comprise the following two single chain polypeptides: A first chain polypeptide from amino to carboxyl terminus comprises a first binding domain, CH1, hinge, CH2, and CH3, and a second chain polypeptide from amino to carboxyl terminus comprises a CK, first hinge, CH2, CH3, second hinge, and a second binding domain. The hinge in the first chain would be regarded as “corresponding” to the first hinge of the second chain because both are amino terminal to the Fc region portions to which they are connected.

[0221] In certain embodiments where a single chain polypeptide of a polypeptide heterodimer comprises a binding domain at or near its carboxyl terminus, a hinge may be present to link the binding domain with another portion of the single chain polypeptide (e.g., an Fc region portion or an immunoglobulin heterodimerization domain). In one embodiment, such a hinge is a non-immunoglobulin hinge (i.e., a hinge not based on or derived from a wild type immunoglobulin hinge) and may be a stalk region of a type II C-lectin or CD molecule, an interdomain region that connect IgV-like or IgC-like domains of a cell surface receptor, or a derivative or functional variant thereof. Exemplary carboxyl terminal hinges, sometimes referred to as “back-end” hinges, includes those set forth in SEQ ID NOS:78, 734-737, 742-747, and 766-790.

[0222] In certain embodiments, a hinge of one single chain polypeptide of a polypeptide heterodimer is identical to a corresponding hinge of the other single chain polypeptide of the heterodimer. In certain other embodiments, a hinge of one chain is different from that of the other chain (in their length or sequence). The different hinges in the different chains allow different manipulation of the binding affinities of the binding domains to which the hinges are connected, so that the heterodimer is able to preferentially bind to the target of one binding domain over the target of the other binding domain. For example, in certain embodiments, a polypeptide heterodimer has a CD3 or TCR binding domain in one chain and a tumor antigen binding domain in another chain. Having two different hinges in the two chains may allow the heterodimer to bind to the tumor antigen first, and then to a CD3 or TCR molecule second. Thus, the heterodimer may recruit CD3⁺ T cells to tumor cells carrying the tumor antigen, which in turn may damage or destroy the tumor cells.

[0223] Other Components or Modifications

[0224] In certain embodiments, a single chain polypeptide that forms a heterodimer with another single chain polypeptide may contain one or more additional domains or regions. Such additional regions may be a leader sequence (also referred to as “signal peptide”) at the amino-terminus for secretion of an expressed single chain polypeptide. Exemplary leader peptides of this disclosure include natural leader sequences or others, such as those as set forth in SEQ ID NOS:110 and 111.

[0225] Additional regions may also be sequences at the carboxy-terminus for identifying or purifying single chain polypeptides (e.g., epitope tags for detection or purification, such as a histidine tag, biotin, a FLAG® epitope, or any combination thereof).

[0226] Further optional regions may be additional amino acid residues (referred to as “junction amino acids” or “junction amino acid residues”) having a length of 1 to about 10 amino acids (e.g., about 2 to 5 amino acids), which may be resulted from use of specific expression systems or construct design for the single chain polypeptides of the present disclosure. Such additional amino acid residues (for instance, one, two, three, four or five additional amino acids) may be present at the amino or carboxyl terminus or between various regions or domains of a single chain polypeptide, such as between a binding domain and an immunoglobulin heterodimerization domain, between an immunoglobulin heterodimerization domain and a hinge, between a hinge and an Fc region portion, between domains of an Fc region portion (e.g., between CH2 and CH3 domains or between two CH3 domains), between a binding domain and a hinge, between an Fc region portion and an immunoglobulin heterodimerization domain, or between a variable domain and a linker. Exemplary junction amino acids amino-terminal to a hinge include RDQ (SEQ ID NO:598), RT, SS, SASS (SEQ ID NO:599) and SSS (SEQ ID NO:600). Exemplary junction amino acids carboxy-terminal to a hinge include amino acids SG. Additional exemplary junction amino acids include SR.

[0227] In certain embodiments, junction amino acids are present between an Fc region portion that comprises CH2 and CH3 domains and an immunoglobulin heterodimerization domain (CH1 or CL). These junction amino acids are also referred to as a “linker between CH3 and CH1 or CL” if they are present between the C-terminus of CH3 and the N-terminus of CH1 or CL. Such a linker may be about 2-12 amino acids in length. In certain embodiments, the Fc region portion comprises human IgG1 CH2 and CH3 domains in which the C-terminal lysine residue of human IgG1 CH3 is deleted. Exemplary linkers between CH3 and CH1 include those set forth in SEQ ID NO:847-849. Exemplary linkers between CH3 and Ck include those set forth in SEQ ID NOS:850-852 (in which the carboxyl terminal arginine in the linkers may alternatively be regarded as the first arginine of Ck). In certain embodiments, the presence of such linkers or linker pairs (e.g., SEQ ID NO:847 as a CH3-CH1 linker in one single chain polypeptide of a heterodimer and SEQ ID NO:850 as a CH3-Ck linker in the other single chain polypeptide of the heterodimer; SEQ ID NO:848 as a CH3-CH1 linker and SEQ ID NO:851 as a CH3-Ck linker; and SEQ ID NO:849 as a CH3-CH1 linker and SEQ ID NO:852 as a CH3-Ck linker) improves the production of heterodimer compared the presence of a reference linker as set forth in SEQ ID NO:846 (in which the last lysine of CH3 is included as part of the linker) in both single chain polypeptides of a heterodimer.

[0228] In certain embodiments, an immunoglobulin Fc region (e.g., CH2, CH3, and/or CH4 regions) of a polypeptide heterodimer of the present disclosure may have an altered glycosylation pattern relative to an immunoglobulin reference sequence. For example, any of a variety of genetic techniques may be employed to alter one or more particular amino acid residues that form a glycosylation site (see Co et al. (1993) Mol. Immunol. 30:1361; Jacquemon et al. (2006) J. Thromb. Haemost. 4:1047; Schuster et al. (2005) Cancer Res. 65:7934; Warnock et al. (2005) Biotechnol. Bioeng. 92:831), such as N297 of the CH2 domain (EU numbering). Alternatively, the host cells producing polypeptide heterodimers of this disclosure may be engineered to produce an altered glycosylation pattern. One method known in the art, for example, provides altered glycosylation in the form of bisected, non-fucosylated variants that increase ADCC. The variants result from expression in a host cell containing an oligosaccharide-modifying enzyme. Alternatively, the POTELLIGENT® technology of BioWa/Kyowa Hakko is contemplated to reduce the fucose content of glycosylated molecules according to this disclosure. In one known method, a CHO host cell for recombinant immunoglobulin production is provided that modifies the glycosylation pattern of the immunoglobulin Fc region, through production of GDP-fucose.

[0229] Alternatively, chemical techniques are used to alter the glycosylation pattern of polypeptide heterodimers of this disclosure. For example, a variety of glycosidase and/or mannosidase inhibitors provide one or more of desired effects of increasing ADCC activity, increasing Fc receptor binding, and altering glycosylation pattern. In certain embodiments, cells expressing polypeptide heterodimers of the instant disclosure are grown in a culture medium comprising a carbohydrate modifier at a concentration that increases the ADCC of immunoglycoprotein molecules produced by said host cell, wherein said carbohydrate modifier is at a concentration of less than 800 μM. In one embodiment, the cells expressing these polypeptide heterodimers are grown in a culture medium comprising castanospermine or kifunensine, for instance, castanospermine at a concentration of 100-800 μM, such as 100 μM, 200 μM, 300 μM, 400 μM, 500 μM, 600 μM, 700 μM, or 800 μM. Methods for altering glycosylation with a carbohydrate modifier such as castanospermine are provided in U.S. Pat. No. 7,846,434 or PCT Publication No. WO 2008/052030.

[0230] Structural Arrangements and Exemplary Heterodimers

[0231] To form a polypeptide heterodimer according to the present invention, two single chain polypeptides are designed so that the immunoglobulin heterodimerization domain of the first single chain polypeptide is properly aligned and interacts with the immunoglobulin heterodimerization domain of the second single chain polypeptide. In certain embodiments, the heterodimer may comprise a second immunoglobulin heterodimerization domain pair to facilitate or enhance the heterodimerization of the two chains. In certain embodiments, in addition to the interaction between the two immunoglobulin heterodimerization domains, an Fc region portion (e.g., a CH3 domain) in the first chain may interact with an Fc region in the second chain to enhance heterodimerization (e.g., via interaction between two wild type CH3 domains or between a CH3 domain pair with “knobs-into-holes” mutations). Moreover, in certain embodiments, the hinge in the first chain (e.g., an altered human IgG1 hinge with two cysteine residues as set forth in SEQ ID NO:664) may interact with the hinge in the second chain (e.g., the same altered human IgG1 hinge as set forth in SEQ ID NO:664) to form, for example, disulfide bonds, which may further strengthen the interaction between the first and second single chain polypeptides to form a polypeptide heterodimer of the present disclosure. Furthermore, in certain embodiments, the first and second chain may comprise a second hinge pair (e.g., at the carboxyl termini of the two chains) to further enhance the interactions between the two chains.

[0232] In certain embodiments, a polypeptide heterodimer of the present disclosure comprises two binding domains (BD1 and BD2), wherein the binding domains bind to two different target molecules. In certain embodiments, the two binding domains (BD1 and BD2) are both on the SCP-I with the immunoglobulin heterodimerization domain (HD-I) and the Fc region portion (FRP-1) disposed between BD1 and BD2. In certain other embodiments, the first binding domain (BD1) is on the SCP-I and the second binding domain (BD2) is on the SCP-II. In certain embodiments, both BD1 and BD2 are amino terminal to the Fc region portion of the SCP-I and SCP-II, respectively. In certain other embodiments, BD1 is amino terminal to the Fc region portion of the SCP-I and BD2 is carboxyl terminal to the Fc region portion of the SCP-II. In certain other embodiments, BD1 is carboxyl terminal to the Fc region portion of the SCP-I and BD2 is amino terminal to the Fc region portion of the SCP-II. In certain other embodiments, both BD1 and BD2 are carboxyl terminal to the Fc region portion of the SCP-I and SCP-II, respectively.

[0233] In certain embodiments, a polypeptide heterodimer comprises three binding domains (BD1, BD2 and BD3), wherein the binding domains bind to two or three different target molecules. For example, BD1, BD2, and BD3 each bind a different target, or BD1 and BD2 bind a first target while BD3 binds a second target, or BD1 and BD3 bind a first target while BD2 binds a second target, or BD2 and BD3 bind a first target while BD1 binds a second target. In certain embodiments, the immunoglobulin heterodimerization domain and the Fc region portion are disposed between BD1 and BD2 on SCP-I, and BD3 is amino terminal to the Fc region portion of the SCP-II. In further embodiments, the immunoglobulin heterodimerization domain and the Fc region portion are disposed between BD1 and BD2 on SCP-II, and BD3 is carboxyl terminal to the Fc region portion of the SCP-I.

[0234] In certain embodiments, a polypeptide heterodimer comprises four binding domains (BD1, BD2, BD3 and BD4), wherein the binding domains bind to two to four different target molecules. In certain embodiments, the immunoglobulin heterodimerization domain and Fc region portion of the SCP-I are disposed between BD1 and BD2, and the immunoglobulin heterodimerization domain and Fc region portion of SCP-II are disposed between BD3 and BD4.

[0235] In certain embodiments, a polypeptide heterodimer comprises five binding domains (BD1, BD2, BD3, BD4 and BD5), wherein the binding domains bind to two to four different target molecules. In certain embodiments, SCP-I comprises three binding domains (BD1, BD2 and BD3), and SCP-II comprises two binding domains (BD4 and BD5). In further embodiments, BD1 and BD2 may be, for example, linked in tandem to each other (either directly or via a peptide linker of about two to eight amino acids) at the amino (or carboxyl) terminus of SCP-I with BD3 located at the carboxyl (or amino) terminus of SCP-I or SCP-II, wherein BD4 and BD5 are on SCP-II if BD3 is on SCP-I, or BD4 or BD5 are on SCP-I if BD3 is on SCP-II.

[0236] In still further embodiments, the polypeptide heterodimer comprises six binding domains (BD1-BD6). In certain embodiments, SCP-I and SCP-II each comprise three binding domains (e.g., BD1-BD3 on SCP-I, and BD4-BD6 on SCP-II). In such embodiments, for example, BD1 and BD2 may be linked in tandem and located at the SCP-I amino (or carboxyl) terminus, and BD3 may be located at the SCP-I carboxyl (or amino) terminus. Similarly, BD4 and BD5 may be linked in tandem and located at the SCP-II amino (or carboxyl) terminus, and BD6 may be located at the SCP-II carboxyl (or amino) terminus. In certain other embodiments, the first single chain polypeptide (SCP-I) comprises four binding domains (BD1-BD4) and the second single chain polypeptide (SCP-II) comprises two binding domains (BD5 and BD6). In such embodiments, BD1 and BD2 may be linked in tandem and located at or near amino terminus of SCP-I, BD3 and BD4 may be linked in tandem and located at or near carboxyl terminus of SCP-I, and BD5 and BD6 may be located at or near the amino and carboxyl termini of SCP-II, respectively.

[0237] In certain embodiments, the polypeptide heterodimer comprises seven binding domains (BD1-BD7). In such embodiments, SCP-I may comprise four binding domains (BD1-BD4), and SCP-II may comprise the other three binding domains (BD5-BD7). For example, BD1 and BD2 may be linked in tandem and located at or near the amino terminus of SCP-I, and BD3 and BD4 may be linked in tandem and located at or near the carboxyl terminus of SCP-II. BD5 and BD6 may be linked in tandem and located at or near the amino (or carboxyl) terminus of SCP-II, and BD7 may be located at or near the carboxyl (or amino) terminus of SCP-II.

[0238] In certain embodiments, the polypeptide heterodimer comprises eight binding domains (BD1-BD8). In such embodiments, the first and second single chain polypeptides may each comprise four binding domains. In each chain, two binding domains may be located at or near the amino terminus, and the other two binding domains located at or near the carboxyl terminus.

[0239] To simplify the description of how various components can be arranged to make first and second single chain polypeptides that form polypeptide heterodimers of the present disclosure, arrangements in exemplary embodiments (1) to (50) are provided below in which only two binding domains are included in each heterodimer.

[0240] In embodiment (1), a polypeptide heterodimer comprises the following two single chain polypeptides: from amino terminus to carboxyl terminus, a first single chain polypeptide comprising a first binding domain, a CH1 region, a hinge, and an Fc region portion; and a second single chain polypeptide comprising a second binding domain, a CL region (e.g., Cκ, Cλ), a hinge, and an Fc region portion.

[0241] In embodiment (2), a polypeptide heterodimer comprises the following two single chain polypeptides: from amino terminus to carboxyl terminus, a first single chain polypeptide comprising a first binding domain, a hinge, an Fc region portion, and a CH1 region; and a second single chain polypeptide comprising a second binding domain, a hinge, an Fc region portion, and a CL region.

[0242] In embodiment (3), a polypeptide heterodimer comprises the following two single chain polypeptides: from amino terminus to carboxyl terminus, a first single chain polypeptide comprising a first binding domain, a CH1 region, a hinge, an Fc region portion, and a second CH1 region; and a second single chain polypeptide comprising a second binding domain, a CL region, a hinge, an Fc region portion, and a second CL region.

[0243] In embodiment (4), a polypeptide heterodimer comprises the following two single chain polypeptides: from amino terminus to carboxyl terminus, a first single chain polypeptide comprising a first binding domain, a CH1 region, a second CH1 region, a hinge, and an Fc region portion; and a second single chain polypeptide comprising a second binding domain, a CL region, a second CL region, a hinge and an Fc region portion.

[0244] In embodiment (5), a polypeptide heterodimer comprises the following two single chain polypeptides: from amino terminus to carboxyl terminus, a first single chain polypeptide comprising a first binding domain, a hinge, an Fc region portion, a CH1 region, and a second CH1 region; and a second single chain polypeptide comprising a second binding domain, a hinge, an Fc region portion, a CL region and a second CL region.

[0245] In embodiment (6), a polypeptide heterodimer comprises the following two single chain polypeptides: from amino terminus to carboxyl terminus, a first single chain polypeptide comprising a CH1 region, a hinge, an Fc region portion, a second hinge, and a first binding domain; and a second single chain polypeptide comprising a CL region, a hinge, an Fc region portion, a second hinge, and a second binding domain.

[0246] In embodiment (7), a polypeptide heterodimer is formed from the following two single chain polypeptides: from amino terminus to carboxyl terminus, a first single chain polypeptide comprising a hinge, an Fc region portion, a CH1 region, a second hinge, and a first binding domain; and a second single chain polypeptide comprising a hinge, an Fc region portion, a CL region, a second hinge, and a second binding domain.

[0247] In embodiment (8), a polypeptide heterodimer comprises the following two single chain polypeptides: from amino terminus to carboxyl terminus, a first single chain polypeptide comprising a CH1 region, a hinge, an Fc region portion, a second CH1 region, a second hinge, and a first binding domain; and a second single chain polypeptide comprising a CL region, a hinge, an Fc region portion, a second CL region, a second hinge, and a second binding domain.

[0248] In embodiment (9), a polypeptide heterodimer comprises the following two single chain polypeptides: from amino terminus to carboxyl terminus, a first single chain polypeptide comprising a CH1 region, a second CH1 region, a hinge, an Fc region portion, a second hinge, and a first binding domain; and a second single chain polypeptide comprising a CL region, a second CL region, a hinge, an Fc region portion, a second hinge, and a second binding domain.

[0249] In embodiment (10), a polypeptide heterodimer comprises the following two single chain polypeptides: from amino terminus to carboxyl terminus, a first single chain polypeptide comprising a hinge, an Fc region portion, a CH1 region, a second CH1 region, a second hinge, and a first binding domain; and a second single chain polypeptide comprising a hinge, an Fc region portion, a CL region, a second CL region, a second hinge, and a second binding domain.

[0250] In embodiment (11), a polypeptide heterodimer comprises the following two single chain polypeptides: from amino terminus to carboxyl terminus, a first single chain polypeptide comprising a first binding domain, a CL region, a hinge, and an Fc region portion; and a second single chain polypeptide comprising a second binding domain, a CH1 region, a hinge, and an Fc region portion.

[0251] In embodiment (12), a polypeptide heterodimer comprises the following two single chain polypeptides: from amino terminus to carboxyl terminus, a first single chain polypeptide comprising a first binding domain, a hinge, an Fc region portion, and a CL region; and a second single chain polypeptide comprising a second binding domain, a hinge, an Fc region portion, and a CH1 region.

[0252] In embodiment (13), a polypeptide heterodimer comprises the following two single chain polypeptides: from amino terminus to carboxyl terminus, a first single chain polypeptide comprising a first binding domain, a CL region, a hinge, an Fc region portion, and a second CL region; and a second single chain polypeptide comprising a second binding domain, a CH1 region, a hinge, an Fc region portion, and a second CH1 region.

[0253] In embodiment (14), a polypeptide heterodimer comprises the following two single chain polypeptides: from amino terminus to carboxyl terminus, a first single chain polypeptide comprising a first binding domain, a CL region, a second CL region, a hinge, and an Fc region portion; and a second single chain polypeptide comprising a second binding domain, a CH1 region, a second CH1 region, a hinge, and an Fc region portion.

[0254] In embodiment (15), a polypeptide heterodimer comprises the following two single chain polypeptides: from amino terminus to carboxyl terminus, a first single chain polypeptide comprising a first binding domain, a hinge, an Fc region portion, a CL region, and a second CL region; and a second single chain polypeptide comprising a second binding domain, a hinge, an Fc region portion, a CH1 region, and a second CH1 region.

[0255] In embodiment (16), a polypeptide heterodimer comprises the following two single chain polypeptides: from amino terminus to carboxyl terminus, a first single chain polypeptide comprising a CL region, a hinge, an Fc region portion, a second hinge, and a first binding domain; and a second single chain polypeptide comprising a CH1 region, a hinge, an Fc region portion, a second hinge, and a second binding domain.

[0256] In embodiment (17), a polypeptide heterodimer comprises the following two single chain polypeptides: from amino terminus to carboxyl terminus, a first single chain polypeptide comprising a hinge, an Fc region portion, a CL region, a second hinge, and a first binding domain; and a second single chain polypeptide comprising a hinge, an Fc region portion, a CH1 region, a second hinge, and a second binding domain.

[0257] In embodiment (18), a polypeptide heterodimer comprises the following two single chain polypeptides: from amino terminus to carboxyl terminus, a first single chain polypeptide comprising a CL region, a hinge, an Fc region portion, a second CL region, a second hinge, and a first binding domain; and a second single chain polypeptide comprising a CH1 region, a hinge, an Fc region portion, a second CH1 region, a second hinge, and a second binding domain.

[0258] In embodiment (19), a polypeptide heterodimer comprises the following two single chain polypeptides: from amino terminus to carboxyl terminus, a first single chain polypeptide comprising a CL region, a second CL region, a hinge, an Fc region portion, a second hinge, and a first binding domain; and a second single chain polypeptide comprising a CH1 region, a second CH1 region, a hinge, an Fc region portion, a second hinge, and a second binding domain.

[0259] In embodiment (20), a polypeptide heterodimer comprises the following two single chain polypeptides: from amino terminus to carboxyl terminus, a first single chain polypeptide comprising a hinge, an Fc region portion, a CL region, a second CL region, a second hinge, and a first binding domain; and a second single chain polypeptide comprising a hinge, an Fc region portion, a CH1 region, a second CH1 region, a second hinge, and a second binding domain.

[0260] In embodiment (21), a polypeptide heterodimer comprises the following two single chain polypeptides: from amino terminus to carboxyl terminus, a first single chain polypeptide comprising a first binding domain, a CH1 region, a hinge, an Fc region portion, and a CL region; and a second single chain polypeptide comprising a second binding domain, a CL region, a hinge, an Fc region portion, and a CH1 region.

[0261] In embodiment (22), a polypeptide heterodimer comprises the following two single chain polypeptides: from amino terminus to carboxyl terminus, a first single chain polypeptide comprising a first binding domain, a CL region, a hinge, an Fc region portion, and a CH1 region; and a second single chain polypeptide comprising a second binding domain, a CH1 region, a hinge, an Fc region portion, and a CL region.

[0262] In embodiment (23), a polypeptide heterodimer comprises the following two single chain polypeptides: from amino terminus to carboxyl terminus, a first single chain polypeptide comprising a first binding domain, a CH1 region, a CL region, a hinge, and an Fc region portion; and a second single chain polypeptide comprising a second binding domain, a CL region, a CH1 region, a hinge and an Fc region portion.

[0263] In embodiment (24), a polypeptide heterodimer comprises the following two single chain polypeptides: from amino terminus to carboxyl terminus, a first single chain polypeptide comprising a first binding domain, a CL region, a CH1 region, a hinge, and an Fc region portion; and a second single chain polypeptide comprising a second binding domain, a CH1 region, a CL region, a hinge and an Fc region portion.

[0264] In embodiment (25), a polypeptide heterodimer comprises the following two single chain polypeptides: from amino terminus to carboxyl terminus, a first single chain polypeptide comprising a first binding domain, a hinge, an Fc region portion, a CH1 region and a CL region; and a second single chain polypeptide comprising a second binding domain, a hinge, an Fc region portion, a CL region and a CH1 region.

[0265] In embodiment (26), a polypeptide heterodimer comprises the following two single chain polypeptides: from amino terminus to carboxyl terminus, a first single chain polypeptide comprising a first binding domain, a hinge, an Fc region portion, a CL region and a CH1 region; and a second single chain polypeptide comprising a second binding domain, a hinge, an Fc region portion, a CH1 region and a CL region.

[0266] In embodiment (27), a polypeptide heterodimer comprises the following two single chain polypeptides: from amino terminus to carboxyl terminus, a first single chain polypeptide comprising a CH1 region, a hinge, an Fc region portion, a CL region, a second hinge, and a first binding domain; and a second single chain polypeptide comprising a CL region, a hinge, an Fc region portion, a CH1 region, a second hinge, and a second binding domain.

[0267] In embodiment (28), a polypeptide heterodimer comprises the following two single chain polypeptides: from amino terminus to carboxyl terminus, a first single chain polypeptide comprising a CL region, a hinge, an Fc region portion, a CH1 region, a second hinge, and a first binding domain; and a second single chain polypeptide comprising a CH1 region, a hinge, an Fc region portion, a CL region, a second hinge, and a second binding domain.

[0268] In embodiment (29), a polypeptide heterodimer comprises the following two single chain polypeptides: from amino terminus to carboxyl terminus, a first single chain polypeptide comprising a CH1 region, a CL region, a hinge, an Fc region portion, a second hinge, and a first binding domain; and a second single chain polypeptide comprising a CL region, a CH1 region, a hinge, an Fc region portion, a second hinge, and a second binding domain.

[0269] In embodiment (30), a polypeptide heterodimer comprises the following two single chain polypeptides: from amino terminus to carboxyl terminus, a first single chain polypeptide comprising a CL region, a CH1 region, a hinge, an Fc region portion, a second hinge, and a first binding domain; and a second single chain polypeptide comprising a CH1 region, a CL region, a hinge, an Fc region portion, a second hinge, and a second binding domain.

[0270] In embodiment (31), a polypeptide heterodimer comprises the following two single chain polypeptides: from amino terminus to carboxyl terminus, a first single chain polypeptide comprising a hinge, an Fc region portion, a CH1 region, a CL region, a second hinge, and a first binding domain; and a second single chain polypeptide comprising a hinge, an Fc region portion, a CL region, a CH1 region, a second hinge, and a second binding domain.

[0271] In embodiment (32), a polypeptide heterodimer comprises the following two single chain polypeptides: from amino terminus to carboxyl terminus, a first single chain polypeptide comprising a hinge, an Fc region portion, a CL region, a CH1 region, a second hinge, and a first binding domain; and a second single chain polypeptide comprising a hinge, an Fc region portion, a CH1 region, a CL region, a second hinge, and a second binding domain.

[0272] In embodiment (33), a polypeptide heterodimer comprises the following two single chain polypeptides: from amino to carboxyl terminus, a first single chain polypeptide comprising a first binding domain, a CH1 region, a hinge, an Fc region portion, a second hinge, and a second binding domain; and a second single chain polypeptide comprising a CL region, a hinge, and an Fc region.

[0273] In embodiment (34), a polypeptide heterodimer comprises the following two single chain polypeptides: from amino to carboxyl terminus, a first single chain polypeptide comprising a first binding domain, a CL region, a hinge, an Fc region portion, a second hinge, and a second binding domain; and a second single chain polypeptide comprising a CH1 region, a hinge and an Fc region portion.

[0274] In embodiment (35), a polypeptide heterodimer comprises the following two single chain polypeptides: from amino to carboxyl terminus, a first single chain polypeptide comprising a first binding domain, a CH1 region, a hinge and an Fc region portion; and a second single chain polypeptide comprising a CL region, a hinge, an Fc region portion, a second hinge and a second binding domain.

[0275] In embodiment (36), a polypeptide heterodimer comprises the following two single chain polypeptides: from amino to carboxyl terminus, a first single chain polypeptide comprising a CH1 region, a hinge, an Fc region portion, a second hinge and a first binding domain; and a second single chain polypeptide comprising a second binding domain, a CL region, a hinge and an Fc region portion.

[0276] In embodiment (37), a polypeptide heterodimer comprises the following two single chain polypeptides: from amino to carboxyl terminus, a first single chain polypeptide comprising a first binding domain, a CH1 region, a hinge, an Fc region portion, and a second hinge; and a second single chain polypeptide comprising a second binding domain, a CL region, a hinge, an Fc region portion, and a second hinge.

[0277] In embodiment (38), a polypeptide heterodimer comprises the following two single chain polypeptides: from amino to carboxyl terminus, a first single chain polypeptide comprising a first binding domain, a hinge, an Fc region portion, a CH1 region, a second hinge, and a second binding domain; and the second single chain polypeptide comprising a hinge, an Fc region portion, and a CL region.

[0278] In embodiment (39), a polypeptide heterodimer comprises the following two single chain polypeptides: from amino to carboxyl terminus, a first single chain polypeptide comprising a hinge, an Fc region portion, and a CH1 region; and a second single chain polypeptide comprising a first binding domain, a hinge, an Fc region portion, a CL region, a second hinge, and a second binding domain.

[0279] In embodiment (40), a polypeptide heterodimer comprises the following two single chain polypeptides: from amino to carboxyl terminus, a first single chain polypeptide comprising a first binding domain, a hinge, an Fc region portion, and a CH1 region; and a second single chain polypeptide comprising a hinge, an Fc region portion, a CL region, a second hinge and a second binding domain.

[0280] In embodiment (41), a polypeptide heterodimer comprises the following two single chain polypeptides: from amino to carboxyl terminus, a first single chain polypeptide comprising a hinge, an Fc region portion, a CH1 region, a second hinge and a first binding domain; and the second single chain polypeptide comprising a second binding domain, a hinge, an Fc region portion, and a CL region.

[0281] In embodiment (42), a polypeptide heterodimer comprises the following two single chain polypeptides: from amino to carboxyl terminus, a first single chain polypeptide comprising a first binding domain, a hinge, an Fc region portion, a CH1 region, and a second hinge; and a second single chain polypeptide comprising a second binding domain, a hinge, an Fc region portion, a CL region and a second hinge.

[0282] In embodiment (43), a polypeptide heterodimer comprises the following two single chain polypeptides: from amino to carboxyl terminus, a first single chain polypeptide comprising a first binding domain, a CH1 region, a hinge an Fc region portion, a CL region, a second hinge and a second binding domain; and the second single chain polypeptide comprising a CL region, a hinge, an Fc region portion and a CH1 region.

[0283] In embodiment (44), a polypeptide heterodimer comprises the following two single chain polypeptides: from amino to carboxyl terminus, a first single chain polypeptide comprising a CH1 region, a hinge, an Fc region portion, and a CL region; and a second single chain polypeptide comprising a first binding domain, a CL region, a hinge, an Fc region, a CH1 region, a second hinge and a second binding domain.

[0284] In embodiment (45), a polypeptide heterodimer comprises the following two single chain polypeptides: from amino to carboxyl terminus, a first single chain polypeptide comprising a first binding domain, a CH1 region, a hinge, an Fc region portion, and a CL region; and a second single chain polypeptide comprising a CL region, a hinge, an Fc region portion, a CH1 region, a second hinge, and a second binding domain.

[0285] In embodiment (46), a polypeptide heterodimer comprises the following two single chain polypeptides: from amino to carboxyl terminus, a first single chain polypeptide comprising a CH1 region, a hinge, an Fc region portion, a CL, a second hinge and a first binding domain; and a second single chain polypeptide comprising a second binding domain, a CL region, a hinge, an Fc region portion, and a CH1 region.

[0286] In embodiment (47), a polypeptide heterodimer comprises the following two single chain polypeptides: from amino to carboxyl terminus, a first single chain polypeptide comprising a first binding domain, a CH1 region, a hinge, an Fc region portion, a second CH1 region, a second hinge, and a second binding domain; and a second single chain polypeptide comprising a CL region, a hinge, an Fc region portion, and a second CL region.

[0287] In embodiment (48), a polypeptide heterodimer comprises the following two single chain polypeptides: from amino to carboxyl terminus, a first single chain polypeptide comprising a CH1 region, a hinge, an Fc region portion, and a second CH1 region; and a second single chain polypeptide comprising a first binding domain, a CL region, a hinge, an Fc region portion, a second CL region, a second hinge, and a second binding domain.

[0288] In embodiment (49), a polypeptide heterodimer comprises the following two single chain polypeptides: from amino to carboxyl terminus, a first single chain polypeptide comprising a first binding domain, a CH1 region, a hinge, an Fc region portion, and a second CH1 region; and a second single chain polypeptide comprising a CL region, a hinge, an Fc region portion, a second CL region, a second hinge and a second binding domain.

[0289] In embodiment (50), a polypeptide heterodimer comprises the following two single chain polypeptides: from amino to carboxyl terminus, a first single chain polypeptide comprising a CH1 region, a hinge, an Fc region portion, a CH1 region, a second hinge, and a first binding domain; and a second single chain polypeptide comprising a second binding domain, a CL region, a hinge, an Fc region portion, and a second CL region.

[0290] Exemplary embodiments (51) to (60) are also provided below in which three or four binding domains are included in each heterodimer. Additional binding domains may be included to make polypeptide heterodimers that comprise five to eight binding domains according to the present disclosure in view of the general description provided herein.

[0291] In embodiment (51), a polypeptide heterodimer comprises the following two single chain polypeptides: from amino to carboxyl terminus, a first single chain polypeptide comprising a first binding domain, a CH1 region, a hinge, an Fc region portion, a second hinge and a second binding domain; and a second single chain polypeptide comprising a third binding domain, a CL region, a hinge and an Fc region portion.

[0292] In embodiment (52), a polypeptide heterodimer comprises the following two single chain polypeptides: from amino to carboxyl terminus, a first single chain polypeptide comprising a first binding domain, a CH1 region, a hinge, an Fc region portion, a second hinge, and a second binding domain; and a second single chain polypeptide comprising a CL region, a hinge, an Fc region portion, a second hinge and a third binding domain.

[0293] In embodiment (53), a polypeptide heterodimer comprises the following two single chain polypeptides: from amino to carboxyl terminus, a first single chain polypeptide comprising a first binding domain, a CL region, a hinge, an Fc region portion, a second hinge and a second binding domain; and the second single chain polypeptide comprising a third binding domain, a CH1 region, a hinge and an Fc region portion.

[0294] In embodiment (54), a polypeptide heterodimer comprises the following two single chain polypeptides: from amino to carboxyl terminus, a first single chain polypeptide comprising a first binding domain, a CL region, a hinge, an Fc region portion, a second hinge and a second binding domain; and a second single chain polypeptide comprising a CH1 region, a hinge, an Fc region portion, a second hinge and a third binding domain.

[0295] In embodiment (55), a polypeptide heterodimer comprises the following two single chain polypeptides: from amino to carboxyl terminus, a first single chain polypeptide comprising a first binding domain, a hinge, an Fc region portion, a CH1 region, a second hinge and a second binding domain; and the second single chain polypeptide comprising a third binding domain, a hinge, an Fc region portion and a CL region.

[0296] In embodiment (56), a polypeptide heterodimer comprises the following two single chain polypeptides: from amino to carboxyl terminus, a first single chain polypeptide comprising a first binding domain, a hinge, an Fc region portion, a CH1 region, a second hinge, and a second binding domain; and a second single chain polypeptide comprising a hinge, an Fc region portion, a CL region, a second hinge, and a third binding domain.

[0297] In embodiment (57), a polypeptide heterodimer comprises the following two single chain polypeptides: from amino to carboxyl terminus, a first single chain polypeptide comprising a first binding domain, a hinge, an Fc region portion, a CL region, a second hinge, and a second binding domain; and a second single chain polypeptide comprising a third binding domain, a hinge, an Fc region portion and a CH1 region.

[0298] In embodiment (58), a polypeptide heterodimer comprises the following two single chain polypeptides: from amino to carboxyl terminus, a first single chain polypeptide comprising a first binding domain, a hinge, an Fc region portion, a CL region, a second hinge, and a second binding domain; and a second single chain polypeptide comprising a hinge, an Fc region portion, a CH1 region, a second hinge, and a third binding domain.

[0299] In embodiment (59), a polypeptide heterodimer comprises the following two single chain polypeptides: from amino to carboxyl terminus: a first binding domain, a CH1 region, a hinge, an Fc region portion, a second hinge, and a second binding domain; and a second single chain polypeptide comprising a third binding domain, a CL region, a hinge, an Fc region portion, a second hinge and a fourth binding domain.

[0300] In embodiment (60), a polypeptide heterodimer comprises the following two single chain polypeptides: from amino to carboxyl terminus, a first single chain polypeptide comprising a first binding domain, a hinge, an Fc region portion, a CH1 region, a second hinge and a second binding domain; and a second single chain polypeptide comprising a third binding domain, a hinge, an Fc region portion, a CL region, a second hinge and a fourth binding domain.

[0301] In embodiments (1) to (32), a polypeptide heterodimer of the present disclosure comprises the following two single chain polypeptides: a first single chain polypeptide comprising a first binding domain (BD1) that specifically binds to a T cell target (e.g., a TCR complex or a component thereof, including TCRα, TCRβ, CD3γ, CD3δ, and CD3ε), a hinge that is an SCC-P IgG1 hinge, an Fc region portion that is a wild type or altered human IgG1 CH2CH3, and a CL region that is wild type or an altered human Ck region with N30Y V55A T70E (YAE) substitutions; and a second single chain polypeptide comprising binding domain (BD2) that specifically binds to a B-cell target (e.g., CD19, CD79b, HLA-DR, CD37, CD20) or a tumor or cancer antigen (e.g., RON, c-Met, EpCAM, CEACAM-6, PSMA), a hinge that is also an SCC-P IgG1 hinge, an Fc region portion that is a wild type or altered human IgG1 CH2CH3, and a CH1 region that is human CH1 region.

[0302] In further embodiments, a polypeptide heterodimer of embodiments (1) to (32) may further comprise a third binding domain (BD3) that is identical to BD1 or BD2, and is linked to a single chain polypeptide via a second hinge (e.g., linker H75 or H68 as set forth in SEQ ID NOS:742 and 78, respectively). In still further embodiments, a polypeptide heterodimer of embodiment of embodiments (1) to (32) may further comprise third and fourth binding domains (BD3) and (BD4) that each are identical or different to BD1 or BD2 and linked to the single chain polypeptide(s) via a second hinge (e.g., linker H75 or H68 as set forth in SEQ ID NOS:742 and 78).

[0303] In certain embodiments, the polypeptide heterodimers of the present disclosure can be engineered to have binding domains with different affinities to target specific cell types. For example, it may be desirable for a polypeptide heterodimer with a binding domain for a TCR complex or a component thereof and another binding domain for a tumor antigen (or a B-cell target) to preferentially bind tumor cells having the tumor antigen (or B-cells carrying the B-cell target) with a higher affinity so that the polypeptide heterodimer will bind the tumor cells (or the B-cells) first and then recruit T cells via its TCR/CD3 binding domain to the tumor site or cells. Differential binding affinities may be achieved by, for example, choosing a binding domain for one target with a higher binding affinity than the other binding domain has for its target or by including multiple binding domains for one target on a polypeptide heterodimer and a single binding domain or fewer binding domains for the second or other targets. In addition, using different hinges (e.g., using hinges of different lengths) may affect binding of one domain more than another or using different hinges for different binding domains in order to alter the binding activity of the binding domains.

[0304] In certain embodiments, multiple binding domains may need to be located at an appropriate distance from each other so that their interactions with their targets will produce a desirable effect. For example, in certain embodiments, a polypeptide heterodimer comprising a binding domain for a TCR complex or a component thereof in a single chain polypeptide and another binding domain for a tumor antigen or a B-cell target in a second single chain polypeptide may have both binding domains at the amino or carboxyl termini of their corresponding chains so that they are in physical proximity to each other in the polypeptide heterodimer.

[0305] Exemplary heterodimers may be formed from single chain polypeptide pairs described herein. If sequence identification numbers noted herein contain signal peptide sequences (e.g., the first 20 amino acids), such signal peptide sequences are not part of the mature single chain polypeptides that form the exemplary polypeptide heterodimers and thus should be considered excluded.

[0306] Exemplary single chain polypeptides are set forth in SEQ ID NOS:2, 4, 6, 8, 10, 12, 14, 16, 18, 20, 22, 24, 29-32, 53-72, 74, 810-826, 859-864, and 874-882.

[0307] Exemplary heterodimers may be formed from the following single chain polypeptide pairs: SEQ ID NOS:2 and 4, SEQ ID NOS:6 and 8, SEQ ID NOS:10 and 12, SEQ ID NOS:14 and 16, SEQ ID NOS:18 and 20, SEQ ID NOS:20 and 22, SEQ ID NOS:20 and 24, SEQ ID NOS:30 and 32, SEQ ID NOS:29 and 31, SEQ ID NOS:29 and 32, SEQ ID NOS:30 and 72, SEQ ID NOS:53 and 72, SEQ ID NOS:54 and 72, SEQ ID NOS:55 and 72, SEQ ID NOS:70 and 72, SEQ ID NOS:71 and 72, SEQ ID NOS:63 and 56, SEQ ID NOS:64 and 57, SEQ ID NOS:65 and 60, SEQ ID NOS:66 and 58, SEQ ID NOS:67 and 59, SEQ ID NOS:68 and 61, SEQ ID NOS:69 and 62, SEQ ID NOS:54 and 811, SEQ ID NOS:54 and 812, SEQ ID NOS:54 and 813, SEQ ID NOS:814 and 818, SEQ ID NOS:815 and 818, SEQ ID NOS:816 and 818, SEQ ID NOS:817 and 818, SEQ ID NOS:814 and 820, SEQ ID NOS:814 and 821, SEQ ID NOS:54 and 819, SEQ ID NOS:814 and 826, SEQ ID NOS:814 and 822, SEQ ID NOS:814 and 823, SEQ ID NOS:814 and 824, SEQ ID NOS:859 and 862, SEQ ID NOS:860 and 863, SEQ ID NOS:861 and 864, SEQ ID NOS:874 and 825, SEQ ID NOS:875 and 879, SEQ ID NOS:876 and 880, SEQ ID NOS:877 and 881, or SEQ ID NOS:878 and 882.

### Nucleic Acids, Vectors, Host Cells, and Methods for Making Heterodimers

[0308] In a related aspect, the present disclosure also provides isolated nucleic acid (used interchangeably with “polynucleotide”) molecules that encode single chain polypeptides provided herein. Exemplary nucleic acid molecules (either with or without a nucleotide sequence encoding a signal peptide sequence) are set forth in SEQ ID NOS:1, 3, 5, 7, 9, 11, 13, 15, 17, 19, 21, 23, 25-28, 33-52 and 792-808.

[0309] The present disclosure also provides vectors that comprise nucleic acid sequence encoding single chain polypeptides provided herein. As used herein, “vector” refers to a nucleic acid molecule capable of transporting another nucleic acid to which it has been linked. Exemplary vectors include plasmids, yeast artificial chromosomes, and viral genomes. Certain vectors can autonomously replicate in a host cell, while other vectors can be integrated into the genome of a host cell and thereby are replicated with the host genome.

[0310] In certain embodiments, the vectors may be recombinant expression vectors. “Recombinant expression vectors” or “expression vectors” refer to vectors that contain nucleic acid sequences that are operatively linked to an expression control sequence (e.g., a promoter) and are thus capable of directing the expression of those sequences.

[0311] Promoter sequences useful in expression vectors provided herein can be selected from any desired gene using CAT (chloramphenicol transferase) vectors or other vectors with selectable markers. Eukaryotic promoters include CMV immediate early, HSV thymidine kinase, early and late SV40, LTRs from retrovirus, and mouse metallothionein-I. In certain embodiments, the promoters are inducible promoters.

[0312] In certain embodiments, a vector is an expression vector that comprises a nucleic acid sequence encoding a first single chain polypeptide of a polypeptide heterodimer provided herein. In certain other embodiments, a vector is an expression vector that comprises a nucleic acid sequence encoding a second single chain polypeptide of a polypeptide heterodimer provided herein.

[0313] In certain embodiments, a vector is an expression vector that comprises nucleic acid sequences encoding both first and second single chain polypeptides of a polypeptide heterodimer. The promoter for the nucleic acid sequence encoding the first single chain polypeptide may be the same as the promoter for the nucleic acid encoding the second single chain polypeptide. Alternatively, the promoter for the nucleic acid sequence encoding the first single chain polypeptide may be different from the promoter for the nucleic acid encoding the second single chain polypeptide so that the expression level of the first and second single chain polypeptides may be differentially modulated to maximum heterodimerization of the first and second single chain polypeptides. In certain embodiments, one or both the promoters for the nucleic acid encoding the first and second single chain polypeptides are inducible promoters.

[0314] The present disclosure also provides a host cell transformed or transfected with, or otherwise containing, any of the nucleic acids or vectors provided herein. Exemplary host cells include VERO cells, HeLa cells, Chinese hamster ovary (CHO) cell lines (including modified CHO cells capable of modifying the glycosylation pattern of expressed multivalent binding molecules, see US Patent Application Publication No. 2003/0115614), COS cells (such as COS-7), W138, BHK, HepG2, 3T3, RIN, MDCK, A549, PC12, K562, HEK293 cells, HepG2 cells, N cells, 3T3 cells, Spodoptera frugiperda cells (e.g., Sf9 cells), Saccharomyces cerevisiae cells, Escherichia coli, Bacillus subtilis, Salmonella typhimurium, or members of the Streptomycete family.

[0315] In certain embodiments, a host cell comprises a first expression vector containing a nucleic acid encoding a first single chain polypeptide and a second expression vector containing a nucleic acid encoding a second single chain polypeptide.

[0316] In certain other embodiments, a host cell comprises an expression vector containing a nucleic acid encoding both first and second single chain polypeptides.

[0317] The disclosure also includes a method of producing polypeptide heterodimers described herein. In certain embodiments, the method comprises culturing a host cell that comprises nucleic acids encoding both the first and second single chain polypeptides under conditions suitable to express the polypeptides, and optionally isolating or purifying the heterodimers formed from the first and second single chain polypeptides from the culture. The nucleic acid encoding the first single chain polypeptide and the nucleic acid encoding the second single chain polypeptide may be present in a single expression vector in the host cell or in two different expression vectors in the host cells. In the latter case, the ratio between the two expression vectors may be controlled to maximize heterodimerization of the first and second single chain polypeptides.

[0318] The present disclosure provides purified polypeptide heterodimers as described herein. The term “purified,” as used herein, refers to a composition, isolatable from other components, wherein the polypeptide heterodimer is enriched to any degree relative to its naturally obtainable state. In certain embodiments, the present disclosure provides substantially purified polypeptide heterodimers as described herein. “Substantially purified” refers to a polypeptide heterodimer composition in which the polypeptide heterodimer forms the major component of the composition, such as constituting at least about 50%, such as at least about 60%, about 70%, about 80%, about 90%, about 95%, about 99%, of the polypeptides, by weight, in the composition.

[0319] Protein purification techniques are well known to those of skill in the art. These techniques involve, at one level, the crude fractionation of the polypeptide and non-polypeptide fractions. Further purification using chromatographic and electrophoretic techniques to achieve partial or complete purification (or purification to homogeneity) is frequently desired. Analytical methods particularly suited to the preparation of a pure fusion protein are ion-exchange chromatography, size exclusion chromatography; polyacrylamide gel electrophoresis; and isoelectric focusing. Particularly efficient methods of purifying peptides are fast protein liquid chromatography and HPLC.

[0320] Various methods for quantifying the degree of purification are known to those of skill in the art in light of the present disclosure. These include, for example, assessing the amount of polypeptide heterodimers in a fraction by SDS/PAGE analysis and HPLC as illustrated in the examples provided herein.

[0321] The method for making polypeptide heterodimers provided herein is advantageous over a method for first expressing and purifying separately individual single chain polypeptides and then incubating purified individual single chain polypeptides together to form polypeptide heterodimers. For example, certain single chain polypeptides (e.g., certain polypeptides containing only CH1 regions as their immunoglobulin heterodimerization domains) are unstable when expressed alone. In addition, separate expression and purification of individual single chain polypeptides followed by combining the purified individual single chain polypeptides involve more steps than coexpressing both single chain polypeptides followed by purifying resulting polypeptide heterodimers and generally less efficient.

### Compositions and Methods for Using Heterodimers

[0322] In addition to polypeptide heterodimers, the present disclosure also provides pharmaceutical compositions and unit dose forms that comprise the polypeptide heterodimers as well as methods for using the polypeptide heterodimers, the pharmaceutical compositions and unit dose forms.

[0323] Compositions of polypeptide heterodimers of this disclosure generally comprise a polypeptide heterodimer provided herein in combination with a pharmaceutically acceptable excipient, including pharmaceutically acceptable carriers and diluents. Pharmaceutical acceptable excipients will be nontoxic to recipients at the dosages and concentrations employed. They are well known in the pharmaceutical art and described, for example, in Rowe et al., Handbook of Pharmaecutical Excipients: A Comprehensive Guide to Uses, Properties, and Safety, 5^{th} Ed., 2006.

[0324] Pharmaceutically acceptable carriers for therapeutic use are also well known in the pharmaceutical art, and are described, for example, in Remington's Pharmaceutical Sciences, Mack Publishing Co. (A. R. Gennaro (Ed.) 1985). Exemplary pharmaceutically acceptable carriers include sterile saline and phosphate buffered saline at physiological pH. Preservatives, stabilizers, dyes and the like may be provided in the pharmaceutical composition. In addition, antioxidants and suspending agents may also be used.

[0325] Pharmaceutical compositions may also contain diluents such as buffers, antioxidants such as ascorbic acid, low molecular weight (less than about 10 residues) polypeptides, proteins, amino acids, carbohydrates (e.g., glucose, sucrose, dextrins), chelating agents (e.g., EDTA), glutathione and other stabilizers and excipients. Neutral buffered saline or saline mixed with nonspecific serum albumin are exemplary diluents. For instance, the product may be formulated as a lyophilizate using appropriate excipient solutions (e.g., sucrose) as diluents.

[0326] The present disclosure also provides a method for treating a disease or disorder associated with, for example, excessive receptor-mediated signal transduction, comprising administering to a patient in need thereof an effective amount of a polypeptide heterodimer comprising a binding domain that specifically binds a receptor, such as a receptor tyrosine kinase, including EGFR, EGFRvIII, ErbB2, ErbB3, ErbB4, IGF1R, c-Met, RON, and EphA2.

[0327] Exemplary diseases or disorders associated with excess receptor-mediated signal transduction include cancer (e.g., solid malignancy and hematologic malignancy), autoimmune or inflammatory diseases or conditions, sepsis resulting from bacterial infection, and viral infection.

[0328] In one aspect, the present disclosure provides a method for directing T cell activation, comprising administering to a patient in need thereof an effective amount of a polypeptide heterodimer that comprises a binding domain that specifically binds TCRα, TCRβ, CD3γ, CD3δ, CD3ε or a combination thereof, and a second binding domain that specifically binds a different target, for instance, a tumor-specific antigen or other antigen of choice at a site or cell where T cell activation is desired.

[0329] In another aspect, the present disclosure provides a method for inhibiting growth, metastasis or metastatic growth of a malignancy (e.g., a solid malignancy or a hematologic malignancy), comprising administering to a patient in need thereof an effective amount of a polypeptide heterodimer provided herein or a composition thereof.

[0330] A wide variety of cancers, including solid malignancy and hematologic malignancy, are amenable to the compositions and methods disclosed herein. Types of cancer that may be treated include, but are not limited to: adenocarcinoma of the breast, prostate, pancreas, colon and rectum; all forms of bronchogenic carcinoma of the lung (including squamous cell carcinoma, adenocarcinoma, small cell lung cancer and non-small cell lung cancer); myeloid; melanoma; hepatoma; neuroblastoma; papilloma; apudoma; choristoma; branchioma; malignant carcinoid syndrome; carcinoid heart disease; and carcinoma (e.g., Walker, basal cell, basosquamous, Brown-Pearce, ductal, Ehrlich tumor, Krebs 2, merkel cell, mucinous, non-small cell lung, oat cell, papillary, scirrhous, bronchiolar, bronchogenic, squamous cell, and transitional cell). Additional types of cancers that may be treated include: histiocytic disorders; leukemia; histiocytosis malignant; Hodgkin's disease; immunoproliferative small; non-Hodgkin's lymphoma; plasmacytoma; reticuloendotheliosis; melanoma; chondroblastoma; chondroma; chondrosarcoma; fibroma; fibrosarcoma; giant cell tumors; histiocytoma; lipoma; liposarcoma; mesothelioma; myxoma; myxosarcoma; osteoma; osteosarcoma; chordoma; craniopharyngioma; dysgerminoma; hamartoma; mesenchymoma; mesonephroma; myosarcoma; ameloblastoma; cementoma; odontoma; teratoma; thymoma; trophoblastic tumor. Further, the following types of cancers are also contemplated as amenable to treatment: adenoma; cholangioma; cholesteatoma; cyclindroma; cystadenocarcinoma; cystadenoma; granulosa cell tumor; gynandroblastoma; hepatoma; hidradenoma; islet cell tumor; Leydig cell tumor; papilloma; sertoli cell tumor; theca cell tumor; leimyoma; leiomyosarcoma; myoblastoma; myomma; myosarcoma; rhabdomyoma; rhabdomyosarcoma; ependymoma; ganglioneuroma; glioma; medulloblastoma; meningioma; neurilemmoma; neuroblastoma; neuroepithelioma; neurofibroma; neuroma; paraganglioma; paraganglioma nonchromaffin; and glioblastoma multiforme. The types of cancers that may be treated also include, but are not limited to, angiokeratoma; angiolymphoid hyperplasia with eosinophilia; angioma sclerosing; angiomatosis; glomangioma; hemangioendothelioma; hemangioma; hemangiopericytoma; hemangiosarcoma; lymphangioma; lymphangiomyoma; lymphangiosarcoma; pinealoma; carcinosarcoma; chondrosarcoma; cystosarcoma phyllodes; fibrosarcoma; hemangiosarcoma; leiomyosarcoma; leukosarcoma; liposarcoma; lymphangiosarcoma; myosarcoma; myxosarcoma; ovarian carcinoma; rhabdomyosarcoma; sarcoma; neoplasms; nerofibromatosis; and cervical dysplasia.

[0331] Additional exemplary cancers that are also amenable to the compositions and methods disclosed herein are B-cell cancers, including B-cell lymphomas [such as various forms of Hodgkin's disease, non-Hodgkins lymphoma (NHL) or central nervous system lymphomas], leukemias [such as acute lymphoblastic leukemia (ALL), chronic lymphocytic leukemia (CLL), Hairy cell leukemia and chronic myoblastic leukemia] and myelomas (such as multiple myeloma). Additional B cell cancers include small lymphocytic lymphoma, B-cell prolymphocytic leukemia, lymphoplasmacytic lymphoma, splenic marginal zone lymphoma, plasma cell myeloma, solitary plasmacytoma of bone, extraosseous plasmacytoma, extra-nodal marginal zone B-cell lymphoma of mucosa-associated (MALT) lymphoid tissue, nodal marginal zone B-cell lymphoma, follicular lymphoma, mantle cell lymphoma, diffuse large B-cell lymphoma, mediastinal (thymic) large B-cell lymphoma, intravascular large B-cell lymphoma, primary effusion lymphoma, Burkitt lymphoma/leukemia, B-cell proliferations of uncertain malignant potential, lymphomatoid granulomatosis, and post-transplant lymphoproliferative disorder.

[0332] In certain embodiments, polypeptide heterodimers useful for inhibiting growth of a solid malignancy or metastasis or metastatic growth of a solid malignancy or a hematologic malignancy include those that specifically bind to a tumor or cancer antigen and a T cell target. Such heterodimers are typically designed to have a higher binding affinity to the tumor or cancer antigen (e.g., at least about 5, 10, 15, 20, 25, 50, 75 or 100 folds higher) than to the T cell target so that they preferentially bind to the tumor or cancer antigen first and subsequently bind to the T cell target, which in turn recruit and activate T cells to damage or destroy the tumor or cancer cells carrying the tumor or cancer antigen on their surface. Exemplary tumor or cancer antigens and T cell targets include those provided above in the section describing binding domains of polypeptide heterodimers. For instance, a T cell target can be CD3 or PSMA.

[0333] In certain embodiments, polypeptide heterodimers useful for inhibiting growth, metastasis, or metastatic growth of a malignancy, or by directed T cell activation, comprise at least one binding domain that specifically binds an oncology target (including a tumor or cell antigen, such as RON, c-Met, CEACAM-6, or PSMA) and another binding domain that specifically binds a TCR complex or a component thereof (e.g., TCRα, TCRβ, CD3γ, CD3δ, and CD3ε).

[0334] In certain other embodiments, polypeptide heterodimers useful for inhibiting growth, metastasis, or metastatic growth of a malignancy comprise at least one binding domain that specifically binds CD28 and another binding domain that specifically binds CD79b. Such polypeptide heterodimers may further comprise a binding domain that comprises a PDL2 ectodomain, a binding domain that specifically binds hyperIL-6, or both binding domains.

[0335] In certain other embodiments, polypeptide heterodimers useful for inhibiting growth, metastasis, or metastatic growth of a malignancy comprise at least one binding domain that specifically binds RON and another binding domain that specifically binds c-Met.

[0336] In certain other embodiments, polypeptide heterodimers useful for inhibiting growth, metastasis, or metastatic growth of a malignancy comprise binding domains that specifically bind one or more of the following receptor tyrosine kinases: c-Met, RON, EGFR, EGFRvIII, Her2, ErbB3, ErbB4, and IGF1R, EphA2. In certain embodiments, the heterodimers may further comprise one or more binding domains that specifically bind to one or more of the following antiangiogenic agents: PDGFR, VEGFR1-4, and angiopoietin 2. In certain embodiments, the above heterodimers may further comprise one or more binding domains that specifically bind to one or more the following Fc receptors to increase targeting of cytotoxic effector function: CD64, CD32A and CD16. In certain embodiments, the above heterodimers may further comprise a binding domain that specifically binds the transferrin receptor (CD71) to enable degradation of the receptors.

[0337] In certain other embodiments, polypeptide heterodimers useful for inhibiting growth, metastasis, or metastatic growth of a malignancy comprise binding domains that are agonists of two or more of the following TNFSFRs: TNFR1, TNFR2, DR4, DR5, TWEAKR, and FAS.

[0338] In certain other embodiments, polypeptide heterodimers useful for inhibiting growth, metastasis, or metastatic growth of a malignancy comprise binding domains that specifically bind two or more of the following pro-oncogenic cytokines or growth factors: HGF, MSP, EGF (including epiregulin, herregulin, β-regulin, neuregulin), HIF-1α, VEGFA, VEGFB, VEGFC, VEGFD, TNFα, IL-6, hyperIL-6, IL-8, Wnt, sHH, TGFβ, or PDGF.

[0339] In certain embodiments, polypeptide heterodimers useful for inhibiting growth of a solid malignancy or metastasis or metastatic growth of a solid malignancy include those that specifically bind to, for example, EGFR, ErbB3, ErbB4, c-Met, RON, EphA2, IGF1R, VEGFR1, VEGFR2, VEGFR3, CD44v6, CD151, EpCAM, CEACAM6, TGFBR2, GHRHR, GHR, IL-6R, gp130, TNFR2, PD1, TWEAK-R, OSMRβ, Patched-1, Frizzled, or Robo1.

[0340] Polypeptide heterodimers useful for inhibiting metastasis or metastatic growth of a hematologic malignancy include those that specifically bind to, for example, EGFR, ErbB3, c-Met, RON, EphA2, IGF1R, TGFBR2, IL-6R, gp130, TNFR2, PD1, OSMRβ, LTβR, CD19, CD80, CD81, or CD86.

[0341] In another aspect, the present disclosure provides a method for treating an autoimmune or inflammatory disease, disorder or condition, comprising administering to a patient in need thereof an effective amount of a polypeptide heterodimer provided herein or a composition thereof.

[0342] Exemplary autoimmune or inflammatory diseases, disorders or conditions that may be treated by the fusion proteins and compositions and unit dose forms thereof include, and are not limited to, inflammatory bowel disease (e.g., Crohn's disease or ulcerative colitis), diabetes mellitus (e.g., type I diabetes), dermatomyositis, polymyositis, pernicious anaemia, primary biliary cirrhosis, acute disseminated encephalomyelitis (ADEM), Addison's disease, ankylosing spondylitis, antiphospholipid antibody syndrome (APS), autoimmune hepatitis, Goodpasture's syndrome, Graves' disease, Guillain-Barré syndrome (GBS), Hashimoto's disease, idiopathic thrombocytopenic purpura, systemic lupus erythematosus, lupus nephritis, neuropsychiatric lupus, multiple sclerosis (MS), myasthenia gravis, pemphigus vulgaris, asthma, psoriatic arthritis, rheumatoid arthritis, Sjögren's syndrome, temporal arteritis (also known as “giant cell arteritis”), autoimmune hemolytic anemia, Bullous pemphigoid, vasculitis, coeliac disease, chronic obstructive pulmonary disease, endometriosis, Hidradenitis suppurativa, interstitial cystitis, morphea, scleroderma, narcolepsy, neuromyotonia, vitiligo, and autoimmune inner ear disease.

[0343] Exemplary polypeptide heterodimers useful for treating an autoimmune or inflammatory disease, disorder or condition may comprises one or more binding domain that specifically binds CD28, and one, two, or three of the following additional binding domains: a binding domain that comprises PDL2 ectodomain, a binding domain that comprises monoIL-10, and a binding domain that specifically binds CD86. For example, a polypeptide heterodimer may comprise a binding domain that specifically binds CD28 and one to three binding domains that specifically bind CD86.

[0344] Additional exemplary polypeptide heterodimers useful for treating an autoimmune or inflammatory disease, disorder or condition may comprise one or more binding domains that specifically bind CD28 and one or more binding domains that are an IL-10 agonist (e.g., monoIL-10), an HLA-G agonist, an HGF agonist, an IL-35 agonist, a PD-1 agonist, a BTLA agonist, a LIGHT antagonist, a GITRL antagonist or a CD40 antagonist. Alternatively, polypeptide heterodimers may comprise two or more binding domains selected from an IL-10 agonist (e.g., monoIL-10), an HLA-G agonist, an HGF agonist, an IL-35 agonist, a PD-1 agonist, a BTLA agonist, a LIGHT antagonist, a GITRL antagonist or a CD40 antagonist.

[0345] Additional exemplary polypeptide heterodimers useful for treating an autoimmune or inflammatory disease, disorder or condition may comprise one or more binding domains that specifically bind CD32B and one or more binding domains that are an IL-10 agonist (e.g., monoIL-10), an HLA-G agonist, an HGF agonist, an IL-35 agonist, a PD-1 agonist, a BTLA agonist, a LIGHT antagonist, a GITRL antagonist or a CD40 antagonist.

[0346] Additional exemplary polypeptide heterodimers useful for treating an autoimmune or inflammatory disease, disorder or condition may comprise binding domains that specifically bind one or more of the following TNFSFRs: TNFR1, TNFR2, HVEW, LTβR, TWEAKR, TACI, BAFF-R, BCMA, or FAS.

[0347] Additional exemplary polypeptide heterodimers useful for treating an autoimmune or inflammatory disease, disorder or condition may comprise binding domains that specifically bind two or more of the following pro-inflammatory cytokines/chemokines, such as TNFα, IL-6, IL-2, IL-1, IL-8, IP-10, IFNγ, IFNα, RANKL, FASL, TGFβ, IL7, IL10, IL17A/F, TWEAK, CSF2, IGF1, IGF2 or BLyS/APRIL.

[0348] Polypeptide heterodimers useful for treating an autoimmune or inflammatory disease, disorder or condition include those that specifically bind to, for example, TGFBR2, IL-6R, gp130, TNFR1, TNFR2, PD1, HVEM, OX40, CD40, CD137, TWEAK-R, LTβR, LIFRβ, OSMRβ, CD3, TCRα, TCRβ, CD19, CD28, CD80, CD81, CD86, TLR7, TLR9, or any combination thereof.

[0349] In another aspect, the present disclosure provides a method for treating a B-cell associated disorder or disease that comprises administering to a patient in need thereof (e.g., a patient having or suspected of having a B-cell associated disorder or disease) an effective amount of a polypeptide heterodimer provided herein, such as those that specifically bind a B cell target.

[0350] Polypeptide heterodimers useful in treating a B-cell associated disorder or disease may comprise binding domains that specifically bind one or more B-cell targets, such as CD79b, CD19, HLA-DR, CD20, CD21, CD22, CD30, CD33, CD37, CD38, or CD70. The polypeptide heterodimers may further comprise a binding domain that specifically binds a T-cell target, such as a TCR complex or a component thereof, including TCRα, TCRβ, CD3γ, CD3δ, or CD3ε.

[0351] Polypeptide heterodimers useful in treating a B-cell associated disorder or disease may comprise a binding domain that specifically bind a B-cell target, such as CD79b, CD19, HLA-DR, CD20, CD21, CD22, CD30, CD33, CD37, CD38, and CD70, and a binding domain that specifically binds CD64, CD32A, or CD16 to increase targeting of cytotoxic effector function.

[0352] The polypeptide heterodimers or compositions thereof of the present disclosure may be administered orally, topically, transdermally, parenterally, by inhalation spray, vaginally, rectally, or by intracranial injection, or any combination thereof. In one embodiment, the polypeptide heterodimers or compositions thereof are administered parenterally. The term “parenteral,” as used herein, includes subcutaneous injections, intravenous, intramuscular, intracisternal injection, or infusion techniques. Administration by intravenous, intradermal, intramusclar, intramammary, intraperitoneal, intrathecal, retrobulbar, intrapulmonary injection and/or surgical implantation at a particular site is contemplated as well. For instance, the invention includes administering polypeptide heterodimers or compositions thereof by intravenous injection.

[0353] The pharmaceutically effective dose depends on the type of disease, the composition used, the route of administration, the type of subject being treated, the physical characteristics of the specific subject under consideration for treatment, concurrent medication, and other factors that those skilled in the medical arts will recognize. For example, an amount between 0.01 mg/kg and 1000 mg/kg (e.g., about 0.1 to 1 mg/kg, about 1 to 10 mg/kg, about 10-50 mg/kg, about 50-100 mg/kg, about 100-500 mg/kg, or about 500-1000 mg/kg) body weight (which can be administered as a single dose, daily, weekly, monthly, or at any appropriate interval) of active ingredient may be administered depending on the potency of a polypeptide heterodimer of this disclosure.

[0354] Also contemplated is the administration of polypeptide heterodimers or compositions thereof in combination with a second agent. A second agent may be one accepted in the art as a standard treatment for a particular disease state or disorder, such as in cancer, inflammation, autoimmunity, and infection. Exemplary second agents contemplated include polypeptide heterodimers that bind to targets different from those that primary polypeptide heterodimers bind, polyclonal antibodies, monoclonal antibodies, immunoglobulin-derived fusion proteins, chemotherapeutics, ionizing radiation, steroids, NSAIDs, anti-infective agents, or other active and ancillary agents, or any combination thereof.

[0355] In certain embodiments, a polypeptide heterodimer and a second agent act synergistically. In other words, these two compounds interact such that the combined effect of the compounds is greater than the sum of the individual effects of each compound when administered alone (see, e.g., Berenbaum, Pharmacol. Rev. 41:93, 1989).

[0356] In certain other embodiments, a polypeptide heterodimer and a second agent act additively. In other words, these two compounds interact such that the combined effect of the compounds is the same as the sum of the individual effects of each compound when administered alone.

[0357] Second agents useful in combination with polypeptide heterodimers or compositions thereof provided herein may be steroids, NSAIDs, mTOR inhibitors (e.g., rapamycin (sirolimus), temsirolimus, deforolimus, everolimus, zotarolimus, curcumin, farnesylthiosalicylic acid), calcineurin inhibitors (e.g., cyclosporine, tacrolimus), anti-metabolites (e.g., mycophenolic acid, mycophenolate mofetil), polyclonal antibodies (e.g., anti-thymocyte globulin), monoclonal antibodies (e.g., daclizumab, basiliximab), and CTLA4-Ig fusion proteins (e.g., abatacept or belatacept).

[0358] Second agents useful for inhibiting growth of a solid malignancy, inhibiting metastasis or metastatic growth of a solid malignancy, or treating or ameliorating a hematologic malignancy include chemotherapeutic agents, ionizing radiation, and other anti-cancer drugs. Examples of chemotherapeutic agents contemplated as further therapeutic agents include alkylating agents, such as nitrogen mustards (e.g., mechlorethamine, cyclophosphamide, ifosfamide, melphalan, and chlorambucil); bifunctional chemotherapeutics (e.g., bendamustine); nitrosoureas (e.g., carmustine (BCNU), lomustine (CCNU), and semustine (methyl-CCNU)); ethyleneimines and methyl-melamines (e.g., triethylenemelamine (TEM), triethylene thiophosphoramide (thiotepa), and hexamethylmelamine (HMM, altretamine)); alkyl sulfonates (e.g., buslfan); and triazines (e.g., dacabazine (DTIC)); antimetabolites, such as folic acid analogues (e.g., methotrexate, trimetrexate, and pemetrexed (multi-targeted antifolate)); pyrimidine analogues (such as 5-fluorouracil (5-FU), fluorodeoxyuridine, gemcitabine, cytosine arabinoside (AraC, cytarabine), 5-azacytidine, and 2,2′-difluorodeoxycytidine); and purine analogues (e.g., 6-mercaptopurine, 6-thioguanine, azathioprine, 2′-deoxycoformycin (pentostatin), erythrohydroxynonyladenine (EHNA), fludarabine phosphate, 2-chlorodeoxyadenosine (cladribine, 2-CdA)); Type I topoisomerase inhibitors such as camptothecin (CPT), topotecan, and irinotecan; natural products, such as epipodophylotoxins (e.g., etoposide and teniposide); and vinca alkaloids (e.g., vinblastine, vincristine, and vinorelbine); anti-tumor antibiotics such as actinomycin D, doxorubicin, and bleomycin; radiosensitizers such as 5-bromodeozyuridine, 5-iododeoxyuridine, and bromodeoxycytidine; platinum coordination complexes such as cisplatin, carboplatin, and oxaliplatin; substituted ureas, such as hydroxyurea; and methylhydrazine derivatives such as N-methylhydrazine (MIH) and procarbazine.

[0359] In certain embodiments, second agents useful for inhibiting growth metastasis or metastatic growth of a malignancy include polypeptide heterodimers according to the present disclosure that bind to cancer cell targets other than the target that the first polypeptide heterodimer binds. In certain other embodiments, second agents useful for such treatments include polyclonal antibodies, monoclonal antibodies, and immunoglobulin-derived fusion proteins that bind to cancer cell targets. Exemplary cancer cell targets are provided above in the context of describing targets of polypeptide heterodimers useful for the above-noted treatment.

[0360] Further therapeutic agents contemplated by this disclosure for treatment of autoimmune diseases are referred to as immunosuppressive agents, which act to suppress or mask the immune system of the individual being treated. Immunosuppressive agents include, for example, non-steroidal anti-inflammatory drugs (NSAIDs), analgesics, glucocorticoids, disease-modifying antirheumatic drugs (DMARDs) for the treatment of arthritis, or biologic response modifiers. Compositions in the DMARD description are also useful in the treatment of many other autoimmune diseases aside from rheumatoid arthritis.

[0361] Exemplary NSAIDs are chosen from the group consisting of ibuprofen, naproxen, naproxen sodium, Cox-2 inhibitors such as Vioxx and Celebrex, and sialylates. Exemplary analgesics are chosen from the group consisting of acetaminophen, oxycodone, tramadol of proporxyphene hydrochloride. Exemplary glucocorticoids are chosen from the group consisting of cortisone, dexamethasone, hydrocortisone, methylprednisolone, prednisolone, or prednisone. Exemplary biological response modifiers include molecules directed against cell surface markers (e.g., CD4, CD5, etc.), cytokine inhibitors, such as the TNF antagonists (e.g. etanercept (Enbrel), adalimumab (Humira) and infliximab (Remicade)), chemokine inhibitors and adhesion molecule inhibitors. The biological response modifiers include monoclonal antibodies as well as recombinant forms of molecules. Exemplary DMARDs include azathioprine, cyclophosphamide, cyclosporine, methotrexate, penicillamine, leflunomide, sulfasalazine, hydroxychloroquine, Gold (oral (auranofin) and intramuscular) and minocycline.

[0362] Additional second agents useful for treating an autoimmune or inflammatory disease, disorder or condition may be a polyclonal or monoclonal antibody, an immunoglobulin-derived fusion protein (e.g., scFv, SMIP™, PIMS, SCORPION™ fusion proteins), or a polypeptide heterodimer according to the present disclosure that specifically bind a target associated with such a disease, disorder or condition. Examples of such targets are provided above in the context of targets of polypeptide heterodimers of the present disclosure useful in the above-noted treatment.

[0363] It is contemplated the binding molecule composition and the second active agent may be given simultaneously in the same formulation. Alternatively, the second agents may be administered in a separate formulation but concurrently (i.e., given within less than one hour of each other).

[0364] In certain embodiments, the second active agent may be administered prior to administration of a polypeptide heterodimer or a composition thereof. Prior administration refers to administration of the second active agent at least one hour prior to treatment with the polypeptide heterodimer or the composition thereof. It is further contemplated that the active agent may be administered subsequent to administration of the binding molecule composition. Subsequent administration is meant to describe administration at least one hour after the administration of the polypeptide heterodimer or the composition thereof.

[0365] This disclosure contemplates a dosage unit comprising a pharmaceutical composition of this disclosure. Such dosage units include, for example, a single-dose or a multi-dose vial or syringe, including a two-compartment vial or syringe, one comprising the pharmaceutical composition of this disclosure in lyophilized form and the other a diluent for reconstitution. A multi-dose dosage unit can also be, e.g., a bag or tube for connection to an intravenous infusion device.

[0366] This disclosure also contemplates a kit comprising a pharmaceutical composition of this disclosure in unit dose, or multi-dose, container, e.g., a vial, and a set of instructions for administering the composition to patients suffering a disorder such as a disorder described above.

### EXAMPLES

### Example 1

### Bivalent Polypeptide Heterodimer with Two Pairs of Heterodimerization Domains

[0367] Polypeptide heterodimer X0172 was made by co-expressing single chain polypeptides X0130 (2E12 CH1 CH2 CH3 Ck) and X0168 (Ck CH2 CH3 CH1 H68 2E12). Single chain polypeptide X0130 comprises, from its amino to carboxyl terminus: 2E12 (anti-CD28) scFv, human IgG1 CH1, human IgG1 SCC-P hinge, human IgG1 CH2, human IgG1 CH3, and altered human Ck (without the first Arg or the last Cys). The nucleic acid and amino acid sequences of X130 are set forth in SEQ ID NOS:1 and 2, respectively. Single chain polypeptide X0168 comprises, from its amino to carboxyl terminus: altered human Ck (without the first Arg or the last Cys), human IgG1 SCC-P hinge, human IgG1 CH2, human IgG1 CH3, human IgG1 CH1, H68 linker, and 2E12 (anti-CD28) scFv. The nucleic acid and amino acid sequences of X0168 are set forth in SEQ ID NOS:3 and 4, respectively. The amino acid sequence of H68 linker is set forth in SEQ ID NO:78.

[0368] For comparison, polypeptide heterodimer X0124 was made by co-expressing single chain polypeptide X0112 (2E12 CH1 CH2 CH3) and X0113 (Ck CH2 CH3). Single chain polypeptide X0112 comprises, from its amino to carboxyl terminus: 2E12 (anti-CD28) scFv, human IgG1 CH1, human IgG1 SCC-P hinge, human IgG1 CH2, and human IgG1 CH3. The nucleic acid and amino acid sequences of X0112 are set forth in SEQ ID NOS:5 and 6, respectively. Single chain polypeptide X0113 comprises, from its amino to carboxyl terminus: altered human Ck (without the first Arg or the last Cys), human IgG1 SCC-P hinge, human IgG1 CH2, and human IgG1 CH3. The nucleic acid and amino acid sequence of X0113 are set forth in SEQ ID NOS:7 and 8, respectively.

### Expression

[0369] The day before transfection, HEK293 cells were suspended at a cell concentration of 0.5×10⁶ cells/ml in Freestyle 293 expression medium (Gibco). For a large transfection, 250 ml of cells were used, but for a small transfection, 60 ml of cells were used. On the transfection day, 320 ul of 293fectin reagent (Invitrogen) was mixed with 8 ml of media. At the same time, 250 ug of DNA for each of the two chains were also mixed with 8 ml of media and incubated for 5 minutes. After 15 minutes of incubation, the DNA-293fectin mixture was added to the 250 ml of 293 cells and returned to the shaker at 37° C. and shaken at a speed of 120 RPM. For the smaller transfection using 60 ml of cells, a fourth of the DNA, 293fectin and media were used.

### Purification

[0370] Protein A affinity chromatography was used to purify the proteins. 2 mL of packed protein A agarose (Repligen) was added to a Biorad column (Econo-column chromatography column, size 2.5×10 cm), washed extensively with PBS (10× column volume) and the supernatants were loaded, washed with PBS again and eluted with 3 column volumes of Pierce IgG elution buffer. Proteins were then dialyzed extensively against PBS. Proteins were then concentrated using Amicon centrifugal filter devices to a final volume of around 0.5 mL.

[0371] For second step purification, Protein L affinity chromatography or cation exchange chromatography were used. For Protein L purification, protein A purified Polypeptide heterodimer was passed over a Protein L agarose column that had been pre-equilibrated with PBS, washed with PBS (10× column volume) and then eluted with Pierce IgG elution buffer. Proteins were then dialyzed against PBS extensively and concentrated using Amicon centrifugal filter devices to a final volume of around 0.5 mL.

[0372] Samples (200-300 ug) of previously affinity purified (Protein A or Protein L) Polypeptide heterodimer constructs were dialyzed into 20 mM MES, pH 6.0 (Buffer A) and loaded onto a MonoS 5/50 GL cation exchange column (GE Healthcare) at a flow rate of 2 mL/min, using an AKTA Explorer FPLC. The column was allowed to equilibrate for 5 column volumes (CV) and then run in a gradient format to a mixture of 50%:50% buffer A:buffer B (buffer B being 20 mM MES, 1 M NaCl, pH 6.0) over 20 CV. A following mixture of 100% buffer B was run for 5 CV to clean the column, and the system was run for another 5 CV at 100% buffer A to re-equilibrate prior to the next injection. Peaks were collected and analyzed by SDS-PAGE and electrospray mass spectrometry.

### SDS-PAGE Analysis

[0373] Proteins purified were analyzed on a 10% SDS-PAGE gel using Invitrogen's X-cell Surelock gel box.

Synergy with Suboptimal Concentration of PMA

[0374] Peripheral blood mononuclear cells (PBMC) from in-house donors were isolated from heparinized whole blood via centrifugation over Lymphocyte Separation Media (MP Biomedicals, Aurora, Ohio) and washed two times with RPMI media (Gibco-Invitrogen, Carlsbad, Calif.). CD4+ T-cells were then enriched from the PBMC using negative selection with a MACS CD4+ T-cell Isolation Kit (Miltenyi Biotec, Auburn, Calif.). The enriched (>95%) CD4+ T-cells were then resuspended at a concentration of 1×10⁶ cell/ml in complete RPMI/10% FCS. Test reagents were prepared at 40 ug/ml (yielding a final concentration of 10 μg/ml) in complete RPMI/10% FCS and added in 50 μl/well to flat-bottom 96-well plates (BD Falcon, San Jose, Calif.). PMA (Phorbol 12 myristate 13-acetate; A.G. Scientific, Inc., San Diego, Calif.) in complete RPMI/10% FCS was added in 50 ul/well at 4 ng/ml (final concentration of 1 ng/ml). Then T-cells in complete RPMI/10% FCS were added at a concentration of 5×10⁴ cells/well in a 50 μl volume, and finally an appropriate amount of complete RPMI/10% FCS was added to each well (typically 50 ul) to bring the final volume to 200 ul/well. The cells were treated with the test samples +/−PMA and incubated for 72 hours at 37° C. in 5% CO₂. One microliter of tritiated thymidine (Amersham Biosciences, Pisctaway, N.J.) in a 1:50 dilution of complete RPMI/10% FCS (50 ul/well) was added to the wells for the last 6 hours of culture. Plates were harvested onto a Unifilter-96, GF/C microplate (Perkin Elmer, Boston, Mass.) with a Packard Filtermate Harvester (Perkin Elmer, Boston, Mass.). Numbers are expressed as cpm and are the mean of replicate samples.

[0375] FIG. 2 shows that Polypeptide heterodimer X0172 has a differential property compared to 2E12 SMIP M0039 (SEQ ID NO:77). It did not synergize with PMA as well as the SMIP. This bivalent polypeptide heterodimer has a property closer to the monovalent polypeptide heterodimer, X0124, rather than the bivalent SMIP.

[0376] FIG. 3 shows that bivalent polypeptide heterodimer X0172 bound to CD4⁺ cells better than 2E12 scFv (SEQ ID NO:109) and monovalent polypeptide heterodimer X0124.

### Example 2

### Bivalent, Trivalent, Tetravalent Polypeptide Heterodimer Using Single Heterodimerization Domain Pair

[0377] Bivalent polypeptide heterodimer X0251 was made by co-expressing single chain polypeptides X0244 (Ck(YAE) CH2(N297A) CH3 H68 2E12) and X0245 (2E12 CH1 CH2(N297A) CH3). Single chain polypeptide X0244 comprises, from its amino to carboxyl terminus: human Ck(YAE) (i.e., human Ck without the first Arg or last Cys but with N30Y, V55A, and T70E substitutions), human IgG1 SCC-P hinge, human IgG1 CH2 (N297A) (i.e., human IgG1 CH2 with a N297A substitution), human IgG1 CH3, H68 linker, and 2E12 (anti-CD28) scFv. The nucleotide and amino acid sequences of X0244 are set forth in SEQ ID NOS:9 and 10, respectively. Single chain polypeptide X0245 comprises, from its amino to carboxyl terminus: 2E12 (anti-CD28) scFv, human IgG1 CH1, human IgG1 SCC-P hinge, human IgG1 CH2 (N297A), and human IgG1 CH3. The nucleotide and amino acid sequences of X0245 are set forth in SEQ ID NOS:11 and 12, respectively.

[0378] Trivalent, bispecific polypeptide heterodimer X0252 was made by co-expressing single chain polypeptides X0246 (P2C2 Ck(YAE) CH2(N297A) CH3) and X0247 (2E12 CH1 CH2(N297A) CH3 H68 2E12). Single chain polypeptide X0246 comprises, from its amino to carboxyl terminus: P2C2 (anti-CD79b) scFv, human Ck (YAE), human IgG1 SCC-P hinge, human IgG1 CH2 (N297A), and human IgG1 CH3. The nucleotide and amino acid sequences of X0246 are set forth in SEQ ID NOS:13 and 14, respectively. Single chain polypeptide X0247 comprises, from its amino to carboxyl terminus: 2E12 (anti-CD28) scFv, human IgG1 CH1, human IgG1 SCC-P hinge, human IgG1 CH2 (N297A), human IgG1 CH3, H68 linker, and 2E12 (anti-CD28) scFv. The nucleotide and amino acid sequences of X0247 are set forth in SEQ ID NOS:15 and 16, respectively.

[0379] Tetravalent, trispecific polypeptide heterodimer X0253 was made by co-expressing single chain polypeptides X0248 (P2C2 CK(YAE) CH2(N297A) CH3 H68 A2) and X0249 (PDL2 ECD CH1 CH2(N297A) CH3 H68 2E12). Single chain polypeptide X0248 comprises, from its amino to carboxyl terminus: P2C2 (anti-CD79b) scFv, human Ck (YAE), human IgG1 SCC-P hinge, human IgG1 CH2 (N297A), human IgG1 CH3, H68 linker, and A2 (anti-hyperIL-6) scFv. The nucleotide and amino acid sequences of X0248 are set forth in SEQ ID NOS:17 and 18, respectively. Single chain polypeptide X0249 comprises, from its amino to carboxyl terminus: PDL2 ECD (i.e., PDL2 ectodomain), human IgG1 CH1, human IgG1 SCC-P hinge, human IgG1 CH2 (N297A), human IgG1 CH3, H68 linker, and 2E12 (anti-CD28) scFv. The nucleotide and amino acid sequences of X0249 are set forth in SEQ ID NOS:19 and 20, respectively.

[0380] Another tetravalent, tetraspecific polypeptide heterodimer X0283, was made by co-expressing single chain polypeptides X0249 (PDL2 ECD CH1 CH2(N297A) CH3 H68 2E12) and X0281 (monoIL-10 Ck(YAE) CH2(N297A) CH3 H68 3D1). Single chain polypeptide X0281 comprises, from its amino to carboxyl terminus: monoIL-10, human Ck(YAE), human IgG1 SCC-P hinge, human IgG1 CH2 (N297A), human IgG1 CH3, H68 linker, and 3D1(anti-CD86) scFv. The nucleotide and amino acid sequences of X0281 are set forth in SEQ ID NOS:21 and 22.

[0381] As a control for polypeptide heterodimer X0283, tetravalent heterodimer, polypeptide heterodimer X0284, was made by co-expressing single chain polypeptides X0249 (PDL2 ECD CH1 CH2(N297A) CH3 H68 2E12) and X0282 (monoIL-10 Ck CH2(N297A) CH3 H68 3D1). Single chain polypeptide X0282 is identical to X0281 except that it does not contain N30Y V55A T70E substitutions in the human Ck sequence. Thus, single chain polypeptide X0282 comprises, from its amino to carboxyl terminus: monoIL-10, altered human Ck (without the first Arg or the last Cys), human IgG1 SCC-P hinge, human IgG1 CH2 (N297A), human IgG1 CH3, H68 linker, and 3D1(anti-CD86) scFv. The nucleotide and amino acid sequences of X0282 are set forth in SEQ ID NOS:23 and 24, respectively.

[0382] The polypeptide heterodimer molecules were expressed and purified according to Example 1. Purified proteins were analyzed using SDS-PAGE electrophoresis under reduced and non-reduced conditions. Size exclusion chromatography was performed on an AKTA Explorer FPLC (Pharmacia Biotech) using a Superdex200 10/300 GL column. Some proteins were analyzed by electrospray mass spectrometry using an Agilent 6120 TOF ES/MS.

[0383] Surface plasmon resonance (SPR) measurements were performed on a Biacore T100 SPR using HBS-P+ (GE Healthcare) as a running buffer. Target was directly immobilized onto a CM5 chip using standard amine coupling chemistry (BIACORE® Amine Coupling Kit, GE Healthcare), with final immobilization levels between 800 and 1900 Ru (resonance units). Polypeptide heterodimer X0283 was injected at 25° C. or 37° C. for 150 seconds at a flow rate of 30 μl/min in a series of concentrations from 10 nM to 1 μM. Dissociation was monitored for 1200 seconds, and the surface was regenerated by injecting 50 mM NaOH for 60 seconds. Binding interactions with the surface were stable through at least 60 regeneration cycles. Data were analyzed using BiaEvaluation for the T100 software (version 2.0, GE Healthcare).

[0384] The SDS-PAGE electrophoresis and cation exchange chromatography analyses show that polypeptide heterodimers X0251, X0252 and X0253 were reasonably well expressed and purified (FIG. 4). Mass spectrometry analysis of X0252 shows that the protein is mostly homogeneous with an undetectable amount of the homodimers (FIG. 5). In addition, the SDS-PAGE electrophoresis and cation exchange chromatography analyses of polypeptide heterodimers X0283 and X0284 show that polypeptide heterodimer X0283 having the CH1/Ck(YAE) heterodimerization domains efficiently assembled into a heterodimer compared to control polypeptide heterodimer X0284 having the CH1/Ck heterodimerization domains, which formed homodimers as well (FIG. 6). The Biocore analysis further shows that the 3D1 (anti-CD86) binding domain at the carboxyl terminus of single chain polypeptide X0281 monovalently bound to CD86 (FIG. 7).

### Example 3

### Polypeptide Heterodimers with Anti-RON and Anti-c-Met Binding Domains

[0385] A bivalent polypeptide heterodimer with anti-RON binding domains (ORN151) and two bispecific polypeptide heterodimers comprising anti-RON and anti-cMet binding domains (ORN152 and ORN153) were made.

[0386] Bivalent polypeptide heterodimer ORN151 comprises single chain polypeptides ORN145 (4C04 CH2 CH3 CH1) and ORN148 (11H09CH2 CH3 Ck(YAE)). Single chain polypeptide ORN145 comprises from its amino to carboxyl terminus: 4C04 (anti-RON) scFv, human IgG1 SCC-P hinge, human IgG1 CH2, human IgG1 CH3 and human IgG1 CH1. The nucleotide and amino acid sequences of ORN145 are set forth in SEQ ID NOS:26 and 30, respectively. Single chain polypeptide ORN148 comprises from its amino to carboxyl terminus: 11H09 (anti-RON) scFv, human IgG1 SCC-P hinge, human CH2, human CH3, and human Ck(YAE). The nucleotide and amino acid sequences of ORN148 are set forth in SEQ ID NOS:28 and 32, respectively.

[0387] Bispecific (c-Met, RON) polypeptide heterodimer ORN152 comprises single chain polypeptides ORN116 (MET021 CH2 CH3 CH1) and ORN146 (4C04 CH2 CH3 Ck(YAE)). Single chain polypeptide ORN116 comprises from its amino to carboxyl terminus: MET021 (anti-c-Met) scFv, human IgG1 SCC-P hinge, human IgG1 CH2, human IgG1 CH3 and human IgG1 CH1. The nucleotide and amino acid sequences of ORN116 are set forth in SEQ ID NOS:25 and 29, respectively. Single chain polypeptide ORN146 comprises from its amino to carboxyl terminus: 4C04 (anti-RON) scFv, human IgG1 SCC-P hinge, human CH2, human CH3, and human Ck(YAE). The nucleotide and amino acid sequences of ORN146 are set forth in SEQ ID NOS:27 and 31, respectively.

[0388] Bispecific (c-Met, RON) polypeptide heterodimer ORN153 comprises single chain polypeptides ORN116 (MET021 CH2 CH3 CH1) and ORN148 (11H09CH2 CH3 Ck(YAE)).

[0389] Polypeptide heterodimers ORN151, ORN152 and ORN153 were expressed according to Example 1. The following expression levels were obtained: 1.9 μg protein/mL of culture for ORN151, 3.1 μg/mL for ORN152, and 4.9 μg/mL for ORN153.

### Example 4

### Polypeptide Heterodimers with Anti-CD3 Binding Domains

[0390] Several bispecific polypeptide heterodimers with an anti-CD3 binding domain were made: polypeptide heterodimers S0268, S0269, and TSC020 to TSC030. Polypeptide heterodimer S0268 comprises single chain polypeptides ORN145 (4C04 CH2 CH3 CH1) and TSC019 (G19-4 CH2 CH3 Ck(YAE)). Single chain polypeptide TSC019 comprises from its amino to carboxyl terminus: G19-4 (anti-CD3) scFv, human IgG1 SCC-P hinge, human CH2, human CH3, and human Ck(YAE). The nucleotide and amino acid sequences of TSC019 are set forth in SEQ ID NOS:52 and 72, respectively.

[0391] Bispecific (CD3, c-Met) Polypeptide heterodimer S0269 comprises single chain polypeptides ORN160 (5D5 CH2 CH3 CH1) and TSC019 (G19-4 CH2 CH3 Ck(YAE)). Single chain polypeptide ORN160 comprises from its amino to carboxyl terminus: 5D5 (anti-c-Met) scFv, human IgG1 SCC-P hinge, human IgG1 CH2, human IgG1 CH3, and human IgG1 CH1. The nucleotide and amino acid sequences of ORN160 are set forth in SEQ ID NOS:33 and 53, respectively.

[0392] Bivalent (CD19) polypeptide heterodimer TSC020 comprises single chain polypeptides TSC001 (HD37 CH2 CH3 CH1) and TSC019 (G19-4 CH2 CH3 Ck(YAE)). Single chain polypeptide TSC001 comprises from its amino to carboxyl terminus: HD37 (anti-CD19) scFv, human IgG1 SCC-P hinge, human IgG1 CH2, human IgG1 CH3 and human IgG1 CH1. The nucleotide and amino acid sequences of TSC001 are set forth in SEQ ID NOS:34 and 54, respectively.

[0393] Bispecific (CD20, CD3) polypeptide heterodimer TSC021 comprises single chain polypeptides TSC002 (2H7CH2 CH3 CH1) and TSC019 (G19-4 CH2 CH3 Ck(YAE)). Single chain polypeptide TSC002 comprises from its amino to carboxyl terminus: 2H7 (anti-CD20) scFv, human IgG1 SCC-P hinge, human IgG1 CH2, human IgG1 CH3 and human IgG1 CH1. The nucleotide and amino acid sequences of TSC002 are set forth in SEQ ID NOS:35 and 55, respectively.

[0394] Bispecific (CD79b, CD3) polypeptide heterodimer TSC022 comprises single chain polypeptides TSC017 (P2C2H2CH3 CH1) and TSC019 (G19-4 CH2 CH3 Ck(YAE)). Single chain polypeptide TSC017 comprises from its amino to carboxyl terminus: P2C2 (anti-CD79b) scFv, human IgG1 SCC-P hinge, human IgG1 CH2, human IgG1 CH3 and human IgG1 CH1. The nucleotide and amino acid sequences of TSC017 are set forth in SEQ ID NOS:50 and 70, respectively.

[0395] Bispecific (HLA-DR, CD3) polypeptide heterodimer TSC023 comprises single chain polypeptides TSC018 (M0042 CH2 CH3 CH1) and TSC019 (G19-4 CH2 CH3 Ck(YAE)). Single chain polypeptide TSC018 comprises from its amino to carboxyl terminus: M0042 (anti-HLA-DR) scFv, human IgG1 SCC-P hinge, human IgG1 CH2, human IgG1 CH3, and human IgG1 CH1. The nucleotide and amino acid sequences of TSC018 are set forth in SEQ ID NOS:51 and 71, respectively.

[0396] Bivalent polypeptide heterodimer TSC024 comprises single chain polypeptides TSC010 (HD37-“IgA1 hinge”-CH2 CH3 CH1) and TSC003 (G19-4-“IgA1 hinge”-CH2 CH3 Ck(YAE)). Single chain polypeptide TSC010 comprises from its amino to carboxyl terminus: HD37 (anti-CD19) scFv, altered human IgA1 hinge (PSTPPTPSPSTPPTPSPSCPPCP, SEQ ID NO:752), human IgG1 CH2, human IgG1 CH3, and human IgG1 CH1. The nucleotide and amino acid sequences of TSC010 are set forth in SEQ ID NOS:43 and 63, respectively. Single chain polypeptide TSC003 comprises from its amino to carboxyl terminus: G19-4 (anti-CD3) scFv, altered human IgA1 hinge (SEQ ID NO:752), human IgG1 CH2, human IgG1 CH3, and human Ck(YAE). The nucleotide and amino acid sequences of TSC003 are set forth in SEQ ID NOS:36 and 56, respectively.

[0397] Bivalent polypeptide heterodimer TSC025 comprises single chain polypeptides TSC011 (HD37-“IgA2 hinge”-CH2 CH3 CH1) and TSC004 (G19-4-“IgA2 hinge”-CH2 CH3 Ck(YAE)). Single chain polypeptide TSC011 comprises from its amino to carboxyl terminus: HD37 (anti-CD19) scFv, altered human IgA2 hinge (PPPPPCPPCP, SEQ ID NO:748), human IgG1 CH2, human IgG1 CH3, and human IgG1 CH1. The nucleotide and amino acid sequences of TSC011 are set forth in SEQ ID NOS:44 and 64, respectively. Single chain polypeptide TSC004 comprises from its amino to carboxyl terminus: G19-4 (anti-CD3) scFv, altered human IgA2 hinge (SEQ ID NO:748), human IgG1 CH2, human IgG1 CH3, and human Ck(YAE). The nucleotide and amino acid sequences of TSC004 are set forth in SEQ ID NOS:37 and 57, respectively.

[0398] Bivalent polypeptide heterodimer TSC026 comprises single chain polypeptides TSC012 (HD37-“IgG1 hinge”-CH2 CH3 CH1) and TSC007 (G19-4-“IgG1 hinge”-CH2 CH3 Ck(YAE)). Single chain polypeptide TSC012 comprises from its amino to carboxyl terminus: HD37 (anti-CD19) scFv, altered human IgG1 hinge (EPKSSDKTHTSPPSPCPPCP, SEQ ID NO:750), human IgG1 CH2, human IgG1 CH3, and human IgG1 CH1. The nucleotide and amino acid sequences of TSC012 are set forth in SEQ ID NOS:45 and 65, respectively. Single chain polypeptide TSC007 comprises from its amino to carboxyl terminus: G19-4 (anti-CD3) scFv, altered human IgG1 hinge (SEQ ID NO:750), human IgG1 CH2, human IgG1 CH3, and human Ck(YAE). The nucleotide and amino acid sequences of TSC007 are set forth in SEQ ID NOS:40 and 60, respectively.

[0399] Bivalent polypeptide heterodimer TSC027 comprises single chain polypeptides TSC013 (HD37-“IgG3 hinge”-CH2 CH3 CH1) and TSC005 (G19-4-“IgG3 hinge”-CH2 CH3 Ck(YAE)). Single chain polypeptide TSC013 comprises from its amino to carboxyl terminus: HD37 (anti-CD19) scFv, altered human IgG3 hinge (EPKSSDTPPPSPRSPCPPCP, SEQ ID NO:751), human IgG1 CH2, human IgG1 CH3, and human IgG1 CH1. The nucleotide and amino acid sequences of TSC013 are set forth in SEQ ID NOS:46 and 66, respectively. Single chain polypeptide TSC005 comprises from its amino to carboxyl terminus: G19-4 (anti-CD3) scFv, altered human IgG3 hinge (SEQ ID NO:751), human IgG1 CH2, human IgG1 CH3, and human Ck(YAE). The nucleotide and amino acid sequences of TSC005 are set forth in SEQ ID NOS:38 and 58, respectively.

[0400] Bivalent polypeptide heterodimer TSC028 comprises single chain polypeptides TSC014 (HD37-“IgD hinge”-CH2 CH3 CH1) and TSC006 (G19-4-“IgD hinge”-CH2 CH3 Ck(YAE)). Single chain polypeptide TSC014 comprises from its amino to carboxyl terminus: HD37 (anti-CD19) scFv, altered human IgD hinge (ESPKAQASSVPTAQPQAEGSLAKATTAPATTRNTCPPCP, SEQ ID NO:754), human IgG1 CH2, human IgG1 CH3, and human IgG1 CH1. The nucleotide and amino acid sequences of TSC014 are set forth in SEQ ID NOS:47 and 67, respectively. Single chain polypeptide TSC006 comprises from its amino to carboxyl terminus: G19-4 (anti-CD3) scFv, altered human IgD hinge (SEQ ID NO:754), human IgG1 CH2, human IgG1 CH3, and human Ck(YAE). The nucleotide and amino acid sequences of TSC006 are set forth in SEQ ID NOS:39 and 59, respectively.

[0401] Bivalent polypeptide heterodimer TSC029 comprises single chain polypeptides TSC015 (HD37-“IgE CH2 hinge”-CH2 CH3 CH1) and TSC008 (G19-4-“IgE CH2 hinge”-CH2 CH3 Ck(YAE)). Single chain polypeptide TSC015 comprises from its amino to carboxyl terminus: HD37 (anti-CD19) scFv, altered human IgE CH2 hinge (SEQ ID NO:757), human IgG1 CH2, human IgG1 CH3, and human IgG1 CH1. The nucleotide and amino acid sequences of TSC014 are set forth in SEQ ID NOS:48 and 68, respectively. Single chain polypeptide TSC008 comprises from its amino to carboxyl terminus: G19-4 (anti-CD3) scFv, altered human IgE CH2 hinge (SEQ ID NO:757), human IgG1 CH2, human IgG1 CH3, and human Ck(YAE). The nucleotide and amino acid sequences of TSC008 are set forth in SEQ ID NOS:41 and 61, respectively.

[0402] Bivalent polypeptide heterodimer TSC030 comprises single chain polypeptides TSC016 (HD37-“IgM CH2 hinge”-CH2 CH3 CH1) and TSC009 (G19-4-“IgM CH2 hinge”-CH2 CH3 Ck(YAE)). Single chain polypeptide TSC016 comprises from its amino to carboxyl terminus: HD37 (anti-CD19) scFv, altered human IgM CH2 hinge (SEQ ID NO:759), human IgG1 CH2, human IgG1 CH3, and human IgG1 CH1. The nucleotide and amino acid sequences of TSC015 are set forth in SEQ ID NOS:49 and 69, respectively. Single chain polypeptide TSC009 comprises from its amino to carboxyl terminus: G19-4 (anti-CD3) scFv, altered human IgM CH2 hinge (SEQ ID NO:759), human IgG1 CH2, human IgG1 CH3, and human Ck(YAE). The nucleotide and amino acid sequences of TSC009 are set forth in SEQ ID NOS:42 and 62, respectively.

[0403] Bispecific polypeptide heterodimers S0268 (RON, CD3) and S0269 (CD3, c-Met) were expressed according to Example 1. The following expression levels were obtained: 2.2 μg protein/mL of culture for S0268 and 2.7 μg/mL for S0269.

### Example 5

### Cell Binding of Bispecific Polypeptide Heterodimers

[0404] To compare the effectiveness of bispecific polypeptide heterodimer molecules at targeting a tumor cell antigen and T-cells, the on-cell binding characteristics of an anti-RON (4C04 binding domain)×anti-CD3 (G19-4 binding domain) polypeptide heterodimer, S0268 (as described in Example 4), with a different bispecific scaffold (SCORPION™ protein) containing the same binding domains, S0266, were compared. Additionally, the on-cell binding characteristics of two bispecific polypeptide heterodimers, TSC020 and TSC021 (as described in Example 4), targeting different B-cell antigens (CD19 for TSC020 and CD20 for TSC021) as well as a T-cell antigen (CD3) were compared. The nucleotide and amino acid sequences of SCORPION protein S0266 are set forth in SEQ ID NOS:73 and 74, respectively. Nucleotide and amino acid sequences of the single chain polypeptides making up the bispecific polypeptide heterodimers S0268, TSC020, and TSC021 are set forth in SEQ ID NOS:26 and 52 (nucleotide), 30 and 72 (amino acid); 34 and 52 (nucleotide), 54 and 72 (amino acid); and 35 and 52 (nucleotide), 55 and 72 (amino acid), respectively (see also Example 4). Transient transfection in human 293 cells produced 6.9 μg protein/mL of culture for S0266; 2.3 μg/mL of culture for S0268; 3.0 μg/mL of culture for TSC020; and 3.2 μg/mL of culture for TSC021.

[0405] MDA-MB-453 (RON+) breast carcinoma cells, Red 1 (CD19⁺, CD20⁺) mantle cell lymphoma cells, and Jurkat (CD3⁺) T cell leukemia cells were obtained from ATCC (Manassas, Va.), and cultured according to the provided protocol. T-cells were isolated from donor PBMCs using a Pan T-cell Isolation Kit II from Miltenyi Biotec (Bergisch Gladbach, Germany). Non T-cells were separated from PBMCs by being indirectly magnetically labeled with biotin-conjugated monoclonal antibodies and anti-biotin magnetic microbeads. These cells were then depleted by retaining them in a column surrounded by a magnetic field. The T-cells were not retained in the column and were collected in the flow through.

[0406] Binding was assessed by incubating 5×10⁵ T cells or target (MDA-MB-453, Rec1, Jurkat) cells for 30 minutes at 4° C. with serially diluted bispecific molecules S0266 (αRON×αCD3 SCORPION™ protein) or S0268 (αRON×αCD3 polypeptide heterodimer) (for MDA-MB-453 cells and isolated T cells); or TSC020 (αCD19×αCD3) or TSC021 (αCD20×αCD3) for Rec1 and Jurkat cells, in concentrations from 100 nM to 0.1 nM. The cells were washed three times and then incubated with goat anti-human IgG-FITC (1:200 dilution) for another 30 minutes at 4° C. The cells were then washed again three times, fixed in 1% paraformaldehyde and read on a FACS-Calibur instrument.

[0407] Analysis of the FSC high, SSC high subset in FlowJo v7.5 (Tree Star, Inc, Ashland, Oreg.) showed dose-dependent binding of bispecific molecules S0266 and S0268 to both MDA-MB-453 and isolated T-cells (FIGS. 8A and 8B). Unexpectedly, the S0268 polypeptide heterodimer bound with similar affinity to the comparable SCORPION™ molecule (S0266) on both MDA-MB-453 cells and T-cells, although it lacked the potential for any avidity. Higher saturation on both target cell types was also observed with the polypeptide heterodimer, which would be the case if the polypeptide heterodimer was binding at a higher stoichometry (1:1 binding of polypeptide heterodimer to surface antigen) than the equivalent SCORPION™ (potential 1:2 binding of the bivalent Scorpion to surface antigens). Comparison of the CD19-targeting bispecific heterodimer (TSC020; HD37 and G19-4 binding domains) and the CD20-targeting bispecific heterodimer (TSC021; 2H7 and G19-4 binding domains) on Rec1 and Jurkat cells revealed that the TSC020 heterodimer had higher affinity for the Rec1 cells than TSC021 heterodimer (FIG. 9A). However, both TSC020 and TSC021 heterodimers showed similar binding to CD3⁺ Jurkat cells, which is expected since both heterodimers possess the same anti-CD3 binding domain (G19-4) (FIG. 9B).

### Example 6

### Additional Bivalent & Trivalent Polypeptide Heterodimers Using Single Heterodimerization Domain Pair

[0408] Additional multispecific heterodimers were made: TSC046, TSC047, TSC048, TSC054, TSC055, TSC056, TSC057, TSC078, TSC079, TSC080, TSC099, TSC100, TSC101, and TSC102.

[0409] Bivalent polypeptide heterodimer TSC046 comprises single chain polypeptides TSC001 (HD37 CH2 CH3 CH1) and TSC039 (BMA031 CH2 CH3 Ck(YAE)). Single chain polypeptide TSC001 comprises from its amino to carboxyl terminus: HD37 (anti-CD19) scFv, human IgG1 SCC-P hinge, human IgG1 CH2, human IgG1 CH3, and human IgG1 CH1. The nucleotide and amino acid sequences of TSC001 are set forth in SEQ ID NOS:34 and 54, respectively. Single chain polypeptide TSC039 comprises from its amino to carboxyl terminus: BMA031 (anti-TCR) scFv, human IgG1 SCC-P hinge, human IgG1 CH2, human IgG1 CH3, and human Ck(YAE). The nucleotide and amino acid sequences of TSC039 are set forth in SEQ ID NOS:793 and 811, respectively.

[0410] Bivalent polypeptide heterodimer TSC047 comprises single chain polypeptides TSC001 (HD37 CH2 CH3 CH1) and TSC041 (CRIS7 CH2 CH3 Ck(YAE)). Single chain polypeptide TSC041 comprises from its amino to carboxyl terminus: CRIS7 (anti-CD3) scFv, human IgG1 SCC-P hinge, human IgG1 CH2, human IgG1 CH3, and human Ck(YAE). The nucleotide and amino acid sequences of TSC041 are set forth in SEQ ID NOS:794 and 812, respectively.

[0411] Bivalent polypeptide heterodimer TSC048 comprises single chain polypeptides TSC001 (HD37 CH2 CH3 CH1) and TSC043 (OKT3-M CH2 CH3 Ck(YAE)). Single chain polypeptide TSC043 comprises from its amino to carboxyl terminus: OKT3-M (Micromet variant anti-CD3, see also U.S. Pat. No. 7,635,472) scFv, human IgG1 SCC-P hinge, human IgG1 CH2, human IgG1 CH3, and human Ck(YAE). The nucleotide and amino acid sequences of TSC043 are set forth in SEQ ID NOs:795 and 813, respectively.

[0412] Bivalent polypeptide heterodimer TSC054 comprises single chain polypeptides TSC049 (HD37 CH2(ADCC/CDC null) CH3 CH1) and TSC053 (G19-4 CH2(ADCC/CDC null) CH3 Ck(YAE)). Single chain polypeptide TSC049 comprises from its amino to carboxyl terminus: HD37 (anti-CD19) scFv, human IgG1 SCC-P hinge, human IgG1 CH2(ADCC/CDC null) (i.e., human IgG1 CH2 with L234A, L235A, G237A, E318A, K320A, and K322A substitutions), human IgG1 CH3, and human IgG1 CH1. The nucleotide and amino acid sequences of TSC049 are set forth in SEQ ID NOS:796 and 814, respectively. Single chain polypeptide TSC053 comprises from its amino to carboxyl terminus: G19-4 (anti-CD3) scFv, human IgG1 SCC-P hinge, human IgG1 CH2(ADCC/CDC null) (i.e., human IgG1 CH2 with L234A, L235A, G237A, E318A, K320A, and K322A substitutions), human IgG1 CH3, and human Ck(YAE). The nucleotide and amino acid sequences of TSC053 are set forth in SEQ ID NOS:800 and 818, respectively.

[0413] Bivalent polypeptide heterodimer TSC055 comprises single chain polypeptides TSC050 (2H7CH2(ADCC/CDC null) CH3 CH1) and TSC053 (G19-4 CH2(ADCC/CDC null) CH3 Ck(YAE)). Single chain polypeptide TSC050 comprises from its amino to carboxyl terminus: 2H7 (anti-CD20) scFv, human IgG1 SCC-P hinge, human IgG1 CH2(ADCC/CDC null), human IgG1 CH3, and human IgG1 CH1. The nucleotide and amino acid sequences of TSC050 are set forth in SEQ ID NOS:797 and 815, respectively.

[0414] Bivalent polypeptide heterodimer TSC056 comprises single chain polypeptides TSC051 (P2C2 CH2(ADCC/CDC null) CH3 CH1) and TSC053 (G19-4 CH2(ADCC/CDC null) CH3 Ck(YAE)). Single chain polypeptide TSC051 comprises from its amino to carboxyl terminus: P2C2 (anti-CD79) scFv, human IgG1 SCC-P hinge, human IgG1 CH2(ADCC/CDC null), human IgG1 CH3, and human IgG1 CH1. The nucleotide and amino acid sequences of TSC051 are set forth in SEQ ID NOS:798 and 816, respectively.

[0415] Bivalent polypeptide heterodimer TSC057 comprises single chain polypeptides TSC052 (5D5 CH2(ADCC/CDC null) CH3 CH1) and TSC053 (G19-4 CH2(ADCC/CDC null) CH3 Ck(YAE)). Single chain polypeptide TSC052 comprises from its amino to carboxyl terminus: 5D5 (anti-cMet) scFv, human IgG1 SCC-P hinge, human IgG1 CH2(ADCC/CDC null), human IgG1 CH3, and human IgG1 CH1. The nucleotide and amino acid sequences of TSC052 are set forth in SEQ ID NOS:799 and 817, respectively.

[0416] Bivalent polypeptide heterodimer TSC078 comprises single chain polypeptides TSC049 (HD37 CH2(ADCC/CDC null) CH3 CH1) and TSC076 (OKT3 CH2(ADCC/CDC null) CH3 Ck(YAE)). Single chain polypeptide TSC076 comprises from its amino to carboxyl terminus: OKT3 (anti-CD3) scFv, human IgG1 SCC-P hinge, human IgG1 CH2(ADCC/CDC null), human IgG1 CH3, and human Ck(YAE). The nucleotide and amino acid sequences of TSC076 are set forth in SEQ ID NOS:802 and 820, respectively.

[0417] Bivalent polypeptide heterodimer TSC079 comprises single chain polypeptides TSC049 (HD37 CH2(ADCC/CDC null) CH3 CH1) and TSC077 (Nuvion CH2(ADCC/CDC null) CH3 Ck(YAE)). Single chain polypeptide TSC077 comprises from its amino to carboxyl terminus: Nuvion (anti-CD3) scFv, human IgG1 SCC-P hinge, human IgG1 CH2(ADCC/CDC null), human IgG1 CH3, and human Ck(YAE). The nucleotide and amino acid sequences of TSC077 are set forth in SEQ ID NOS:803 and 821, respectively.

[0418] Trivalent polypeptide heterodimer TSC080 comprises single chain polypeptides TSC001 (HD37 CH2 CH3 CH1) and TSC064 (G19-4 CH2 CH3 Ck(YAE) H75 Met021). Single chain polypeptide TSC064 comprises from its amino to carboxyl terminus: G19-4 (anti-CD3) scFv, human IgG1 SCC-P hinge, human IgG1 CH2, human IgG1 CH3, human Ck(YAE), H75 linker, and Met021 (anti-c-Met) scFv (with the three serine residues at the C-terminus deleted). The nucleotide and amino acid sequences of TSC064 are set forth in SEQ ID NOS:801 and 819, respectively.

[0419] Bivalent polypeptide heterodimer TSC099 comprises single chain polypeptides TSC049 (HD37 CH2(ADCC/CDC null) CH3 CH1) and TSC097 (4C04 CH2(ADCC/CDC null) CH3 Ck(YAE)). Single chain polypeptide TSC097 comprises from its amino to carboxyl terminus: 4C04 (anti-RON) scFv, human IgG1 SCC-P hinge, human IgG1 CH2(ADCC/CDC null), human IgG1 CH3, and human Ck(YAE). The nucleotide and amino acid sequences of TSC097 are set forth in SEQ ID NOS:808 and 826, respectively.

[0420] Bivalent polypeptide heterodimer TSC100 comprises single chain polypeptides TSC049 (HD37 CH2(ADCC/CDC null) CH3 CH1) and TSC093 (CRIS7 CH2(ADCC/CDC null) CH3 Ck(YAE)). Single chain polypeptide TSC093 comprises from its amino to carboxyl terminus: CRIS7 (anti-CD3) scFv, human IgG1 SCC-P hinge, human IgG1 CH2(ADCC/CDC null), human IgG1 CH3, and human Ck(YAE). The nucleotide and amino acid sequences of TSC093 are set forth in SEQ ID NOS:804 and 822, respectively.

[0421] Bivalent polypeptide heterodimer TSC101 comprises single chain polypeptides TSC049 (HD37 CH2(ADCC/CDC null) CH3 CH1) and TSC094 (OKT3-M CH2(ADCC/CDC null) CH3 Ck(YAE)). Single chain polypeptide TSC094 comprises from its amino to carboxyl terminus: OKT3-M (Micromet variant anti-CD3) scFv, human IgG1 SCC-P hinge, human IgG1 CH2(ADCC/CDC null), human IgG1 CH3, human Ck(YAE). The nucleotide and amino acid sequences of TSC094 are set forth in SEQ ID NOS:805 and 823, respectively.

[0422] Bivalent polypeptide heterodimer TSC102 comprises single chain polypeptides TSC049 (HD37 CH2(ADCC/CDC null) CH3 CH1) and TSC095 (BMA031 CH2(ADCC/CDC null) CH3 Ck(YAE)). Single chain polypeptide TSC095 comprises from its amino to carboxyl terminus: BMA031 (anti-TCR) scFv, human IgG1 SCC-P hinge, human IgG1 CH2(ADCC/CDC null), human IgG1 CH3, human Ck(YAE). The nucleotide and amino acid sequences of TSC095 are set forth in SEQ ID NOS:806 and 824, respectively.

[0423] The polypeptide heterodimer molecules were expressed and purified according to Example 1.

### Example 7

### Target-Dependent T-Cell Proliferation by Polypeptide Heterodimers

[0424] To compare the effectiveness of different bispecific polypeptide heterodimer molecules at inducing target-dependent T-cell activation and proliferation, three different bispecific molecules (TSC054, TSC078, and TSC079 as described in Example 6) with a common anti-CD19 binding domain (HD37) and three different anti-CD3 binding domains (G19-4 for TSC054, OKT3 for TSC078, HuM291 for TSC079) were compared. As a positive control, a Bispecific T-Cell Engaging molecule (BiTE) known as bsc19×3 was also prepared (see U.S. Pat. No. 7,635,472). The nucleotide and amino acid sequences for bsc19×3 are set forth in SEQ ID NOS:809 and 827, respectively. Transient transfection in human 293 cells produced 2.33 ug/mL protein for TSC054, 0.67 ug/mL protein for TSC078, and 3.5 ug/mL for TSC079.

[0425] Daudi Burkitt's lymphoma cells (CD19⁺) and MDA-MB-453 (CD19⁻) breast carcinoma cells were obtained from ATCC (Manassas, Va.) and cultured according to the provided protocol. Peripheral blood mononuclear cells (PBMC) were isolated from human blood using standard ficoll gradients. The isolated cells were washed in saline buffer. T cells were additionally isolated using a Pan T-cell Isolation Kit II from Miltenyi Biotec (Bergisch Gladbach, Germany) using the manufacturer's protocol (see also Example 5 for more information).

[0426] Proliferation was assessed by labeling isolated PBMC or T cell populations with carboxyfluorescein diacetate succinimidyl ester (CFSE). CFSE-labeled PBMC or T cells were plated in U-bottom 96-well plates at 150,000 or 100,000 cells/well, respectively, with various numbers of tumor cells, to achieve T cell to tumor cell ratios of 10:1 to 3:1. Concentrations of test molecules ranging from 8 nM to 0.08 pM were added to the cell mixtures in a total of 200 ul/well in RPMI 1640 media supplemented with 10% human or bovine serum, sodium pyruvate and non-essential amino acids. Plates were incubated at 37° C., 5% CO₂ in humidified incubators. After 3 days, cells were labeled with antibodies for flow cytometric analysis. Cells were labeled and washed in their original plates to minimize cell losses during transfers, and all labeling was done in saline buffer with 0.2% bovine serum albumin. First, cells were pre-incubated with 100 ug/ml human IgG at room temperature for 15 min. Subsequently, cells were incubated with a mixture (total volume 50 ul) of the following dye-labeled antibodies: CD5-PE, CD4-APC, CD8-Pacific Blue, CD25-PE-Cy7, as well as 7-Amino Actinomycin D (7AAD hereafter) for 40 min. Plates were washed twice, resuspended in 80 to 120 ul volumes and ran immediately in a BD LSRII flow cytometer to acquire 80% of the contents of each well. The sample files were analyzed using FlowJo software to calculate the percentages and numbers of cells that had undergone at least one cell division, according to their CFSE profile, by gating sequentially on activated, live CD4+ or CD8+ T cells (7AAD−, CD5+ CD25+ CD4+ or 7AAD− CD5+ CD25+ CD8+, respectively). Mean values and standard deviations were calculated using Microsoft Excel software. Graphs were plotted using Microsoft Excel or Graphpad Prism.

[0427] Analysis of live CD4+ and CD8+ populations from Daudi cells or MDA-MB-453 cells treated with whole PBMCs (FIGS. 10A-10D) revealed a significant increase in both the total number of cells and percent proliferating cells in the presence of Daudi cells displaying the target CD19 antigen (FIGS. 10A, 10B), but a lack of significant proliferation in the presence of MDA-MB-453 cells that lacked the CD19 antigen (FIGS. 10C, 10D). Some proliferation was observed at a lower level with the MDA-MB-453 cells and whole PBMCs, since B-cells (CD19+) were present in the PBMCs, but overall proliferation was greatly reduced in comparison. This selectivity was observed with isolated T-cells as well. Proliferation was higher for CD8+ T-cells than CD4+ T-cells in the presence of Daudi cells or MDA-MB-453 cells treated with PBMCs (FIG. 10A-10D), and the proliferation induced by TSC078 (HD37×OKT3) was generally higher at all concentrations than the response induced by TSC054 (HD37×G19-4) or TSC079 (HD37×HuM291) (FIGS. 10A-10D). Induced proliferation of CD4+ T-cells was lower in all cases for TSC054, TSC078, and TSC079 than the BiTE bsc19×3 (FIG. 10A), although TSC078 and TSC079 showed superior induction of proliferation of CD8+ cells at lower concentrations (e.g. 5 pM) than the BiTE molecule (FIG. 10B).

### Example 8

### Redirected T-Cell Cytotoxicity by Polypeptide Heterodimers

[0428] To compare the effectiveness of different bispecific polypeptide heterodimer molecules at inducing target-dependent T-cell cytotoxicity, four different bispecific molecules were compared in a chromium (⁵¹Cr) release assay. Three different bispecific molecules (TSC054, TSC078, TSC079, as described in Example 6) with a common anti-CD19 binding domain (HD37) and three different anti-CD3 binding domains (G19-4 for TSC054, OKT3 for TSC078, HuM291 for TSC079) were tested alongside a fourth bispecific molecule (S0268, described in Example 4) with an anti-RON binding domain (4C04) and an anti-CD3 binding domain (G19-4). Transient transfection in human 293 cells produced about 2.33 μg/mL protein for TSC054, about 0.67 μg/mL protein for TSC078, and about 3.5 μg/mL protein for TSC079.

[0429] Daudi Burkitt's lymphoma cells (CD19+, RON−) and BxPC-3 cells (CD19−, RON+) were obtained from ATCC (Manassas, Va.) and cultured according to the provided protocol. Peripheral blood mononuclear cells (PBMC) were isolated from human blood using standard ficoll gradients. The isolated cells were washed in saline buffer. T cells were additionally isolated using a Pan T-cell Isolation Kit II from Miltenyi Biotec (Bergisch Gladbach, Germany) using the manufacturer's protocol (see also Example 5 for more information).

[0430] Cytotoxicity was assessed by a ⁵¹Cr release assay. Approximately 5×10⁶ Daudi or BxPC-3 cells were treated with 0.3 mCi of ⁵¹Cr and incubated for 75 minutes at 37° C. After 75 minutes, cells were washed 3 times with media (RPMI+10% FBS) and resuspended in 11.5 mL of media. From this suspension, 50 μL was dispensed per well into 96 well U-bottom plates (approximately 20,000 cells/well). Concentrations of bispecific molecules ranging from 10 nM to 0.1 pM were added to the target (Daudi, BxPC-3) cells, bringing the total volume to 100 μL/well. Target cells were incubated at room temperature for 15 minutes. Then 100 μL of isolated T-cells (approximately 200,000) were added to bring the T-cell to target cell ratio to 10:1. 50 μL of 0.8% NP-40 was added to a control well containing target cells, left for 15 minutes, then 100 μL of media was added to provide a total lysis control.

[0431] Plates were incubated for 4 hours, spun at 1500 rpm for 3 minutes, and 25 μL of supernatant was transferred from each well to the corresponding well of a 96-well Luma sample plate. Sample plates were allowed to air dry in a chemical safety hood for 18 hours, and then radioactivity was read on a Topcount scintillation counter using a standard protocol.

[0432] Analysis of cytotoxicity data showed a lack of off-target cytotoxicity on the Daudi (RON−) cells from the anti-RON directed bispecific molecule S0268 (FIG. 11A). Similarly, there was a lack of direct cytotoxicity observed from treating Daudi cells with TSC054 in the absence of T-cells (FIG. 11A). However, strong T-cell directed cytotoxicity was observed with the Daudi cells in the presence of T-cells and an anti-CD19 directed bispecific molecule (TSC054), reaching maximal lysis at a concentration between 10 and 100 pM (FIG. 11A). Similarly, using a second T-cell donor (FIG. 11B), no off-target cytotoxicity of the BxPC-3 (CD19−) cells was observed from the CD19-directed bispecifics TSC054, TSC078, or TSC079, or the CD19-directed BiTE bsc19×3. The anti-RON directed S0268 bispecific molecule induced cytotoxicity in BxPC-3 (RON+) cells, reaching a maximum between 10 and 100 pM (FIG. 11B).

### Example 9

### Modulation of Target-Dependent T-Cell Proliferation by Polypeptide Heterodimers with Altered Hinge Sequences

[0433] To compare the effectiveness of different bispecific polypeptide heterodimer molecules with altered hinge sequences at inducing target-dependent T-cell activation and proliferation, six different bispecific heterodimers (TSC100, TSC127, TSC165, TSC166, TSC167 and TSC168 with a common anti-CD19 binding domain (HD37), a common anti-CD3 binding domain (Cris7) and five different hinge constructs (IgG1 SCC-P hinge for TSC100 and TSC127, IgA2 hinge without the first Val residue linked to a human IgG1 core hinge for TSC165, IgG1 SSS-P hinge linked to a human IgG1 core hinge for TSC166, a portion of mutated IgG3 hinge linked to a IgG1 core hinge for TSC167, and the IgM CH2 domain without the first Val linked to a IgG1 core hinge for TSC168) were compared.

[0434] More specifically, bispecific heterodimer TSC100 is as described in Example 6.

[0435] Bispecific heterodimer TSC127 comprises single chain polypeptides TSC125 (Cris7 CH2(ADCC/CDC null) CH3 CH1) and TSC096 (HD37 CH2(ADCC/CDC null) CH3 Ck(YAE). Single chain polypeptide TSC125 comprises from its amino to carboxyl terminus: humanized Cris7 (anti-CD3) scFv, human IgG1 SCC-P hinge, human IgG1 CH2 (ADCC/CDC null), human IgG1 CH3, and human IgG1 CH1. The nucleotide and amino acid sequences of TSC125 are set forth in SEQ ID NOS:865 and 874, respectively. Single chain polypeptide TSC096 comprises from its amino to carboxyl terminus: HD37 (anti-CD19) scFv, human IgG1 SCC-P hinge, human IgG1 CH2 (ADCC/CDC null), human IgG1 CH3, and human Ck (YAE). The nucleotide and amino acid sequences of TSC096 are set forth in SEQ ID NOS:807 and 825, respectively.

[0436] Bispecific heterodimer TSC165 comprises single chain polypeptides TSC157 (Cris7 IgA2UH CH2 (ADCC/CDC null) CH3 CH1) and TSC161 (HD37 IgA2UH CH2 (ADCC/CDC null) CH3 Ck(YAE)). Single chain polypeptide TSC157 comprises from its amino to carboxyl terminus: humanized Cris7 (anti-CD3) scFv, human IgA2 hinge without the first Val linked with a human IgG1core hinge, human IgG1 CH2 (ADCC/CDC null), human IgG1 CH3, and human IgG1 CH1. The nucleotide and amino acid sequences of TSC157 are set forth in SEQ ID NOS:866 and 875, respectively. Single chain polypeptide TSC161 comprises from its amino to carboxyl terminus: HD37 (anti-CD19) scFv, human IgA2 hinge without the first Val linked with a human IgG1 core hinge, human IgG1 CH2 (ADCC/CDC null), human IgG1 CH3, and human Ck (YAE). The nucleotide and amino acid sequences of TSC161 are set forth in SEQ ID NOS:870 and 879, respectively. The amino acid sequence of the hinge used in TSC157 and TSC161 is set forth in SEQ ID NO:748.

[0437] Bispecific heterodimer TSC166 comprises single chain polypeptide TSC158 (Cris7 IgG1miniUH CH2 (ADCC/CDC null) CH3 CH1) and TSC162 (HD37 IgG1miniUH CH2 (ADCC/CDC null) CH3 Ck(YAE)). Single chain polypeptide TSC158 comprises from its amino to carboxyl terminus: humanized Cris7 (anti-CD3) scFv, human IgG1 SSC-P hinge linked with a human IgG1 core hinge, human IgG1 CH2 (ADCC/CDC null), human IgG1 CH3, and human IgG1 CH1. The nucleotide and amino acid sequences of TSC158 are set forth in SEQ ID NOS:867 and 876, respectively. Single chain polypeptide TSC162 comprises from its amino to carboxyl terminus: HD37 (anti-CD19) scFv, human IgG1 SSC-P hinge linked with a human IgG1 core hinge, human IgG1 CH2 (ADCC/CDC null), human IgG1 CH3, and human Ck (YAE). The nucleotide and amino acid sequences of TSC162 are set forth in SEQ ID NOS:871 and 880. The amino acid sequence of the hinge used in TSC158 and TSC162 is set forth in SEQ ID NO:750.

[0438] Bispecific heterodimer TSC167 comprises single chain polypeptide TSC159 (Cris7 IgG3UH CH2 (ADCC/CDC null) CH3 CH1) and TSC163 (HD37 IgG3UH CH2 (ADCC/CDC null) CH3 Ck(YAE)). Single chain polypeptide TSC159 comprises from its amino to carboxyl terminus: humanized Cris7 (anti-CD3) scFv, a portion of mutated human IgG3 hinge linked with a human IgG1 core hinge, human IgG1 CH2 (ADCC/CDC null), human IgG1 CH3, and human IgG1 CH1. The nucleotide and amino acid sequences of TSC159 are set forth in SEQ ID NOS:868 and 877, respectively. Single chain polypeptide TSC163 comprises from its amino to carboxyl terminus: HD37 (anti-CD19) scFv, a portion of mutated human IgG3 hinge linked with a human IgG1 core hinge, human IgG1 CH2 (ADCC/CDC null), human IgG1 CH3, and human Ck (YAE). The nucleotide and amino acid sequences of TSC163 are set forth in SEQ ID NOS:872 and 881. The amino acid sequence of the hinge used in TSC159 and TSC163 is set forth in SEQ ID NO:751.

[0439] Bispecific heterodimer TSC168 comprises single chain polypeptide TSC160 (Cris7 IgMCH2UH CH2 (ADCC/CDC null) CH3 CH1) and TSC164 (HD37 IgMCH2UH CH2 (ADCC/CDC null) CH3 Ck(YAE)). Single chain polypeptide TSC160 comprises from its amino to carboxyl terminus: humanized Cris7 (anti-CD3) scFv, human IgM CH2 without the first Val linked with a human IgG1 core hinge, human IgG1 CH2 (ADCC/CDC null), human IgG1 CH3, and human IgG1 CH1. The nucleotide and amino acid sequences of TSC160 are set forth in SEQ ID NOS:869 and 878, respectively. Single chain polypeptide TSC163 comprises from its amino to carboxyl terminus: HD37 (anti-CD19) scFv, human IgM CH2 without the first Val linked with a human IgG1core hinge, human IgG1 CH2 (ADCC/CDC null), human IgG1 CH3, and human Ck (YAE). The nucleotide and amino acid sequences of TSC164 are set forth in SEQ ID NOS:873 and 882. The amino acid sequence of the hinge used in TSC160 and TSC164 is set forth in SEQ ID NO:759.

[0440] As a positive control, a Bispecific T-Cell Engaging molecule (BiTE) known as bsc19×3 was also prepared (see U.S. Pat. No. 7,635,472). The nucleotide and amino acid sequences for bsc19×3 are set forth in SEQ ID NOS:809 and 827, respectively.

[0441] Transient transfection in human 293 cells produced 3.2 ug protein/mL of culture for TSC100, 6.1 ug protein/mL of culture for TSC127, 4.8 ug protein/mL of culture for TSC165, 6.2 ug protein/mL of culture for TSC166, 6.4 ug protein/mL of culture for TSC167, and 6.4 ug/mL protein for TSC168.

[0442] Daudi Burkitt's lymphoma cells (CD19⁺) and C4-2 (CD19⁻) prostate carcinoma cells were obtained from ATCC (Manassas, Va.) and MD Anderson Cancer Center (Houston, Tex.) and cultured according to the provided protocol. T cells were isolated using a Pan T-cell Isolation Kit II from Miltenyi Biotec (Bergisch Gladbach, Germany) using the manufacturer's protocol (see also Example 5 for more information).

[0443] Proliferation was assessed by labeling isolated T cell populations with carboxyfluorescein diacetate succinimidyl ester (CFSE). CFSE-labeled T cells were plated in U-bottom 96-well plates at 100,000 cells/well, with 10,000 tumor cells/well, to achieve a T cell to tumor cell ratio of 10:1. Concentrations of test molecules ranging from 5 nM to 0.005 pM were added to the cell mixtures in a total of 200 ul/well in RPMI 1640 media supplemented with 10% human or bovine serum, sodium pyruvate and non-essential amino acids. Plates were incubated at 37° C., 5% CO₂ in humidified incubators. After 3 days, cells were labeled with antibodies for flow cytometric analysis. Cells were labeled and washed in their original plates to minimize cell losses during transfers, and all labeling was done in saline buffer with 0.2% bovine serum albumin. First, cells were pre-incubated with 100 ug/ml human IgG at room temperature for 15 min. Subsequently, cells were incubated with a mixture (total volume 50 ul) of the following dye-labeled antibodies: CD5-PE, CD4-APC, CD8-Pacific Blue, CD25-PE-Cy7, as well as 7-Amino Actinomycin D (7AAD hereafter) for 40 minutes. Plates were washed twice, resuspended in 80 to 120 ul volumes and ran immediately in a BD LSRII flow cytometer to acquire 80% of the contents of each well. The sample files were analyzed using FlowJo software to calculate the percentages and numbers of cells that had undergone at least one cell division, according to their CFSE profile, by gating sequentially on activated, live CD4+ or CD8+ T cells (7AAD−, CD5+ CD25+ CD4+ or 7AAD− CD5+ CD25+ CD8+, respectively). Mean values and standard deviations were calculated using Microsoft Excel software. Graphs were plotted using Microsoft Excel or Graphpad Prism.

[0444] Analysis of live CD4+ and CD8+ populations from Daudi cells or C4-2 cells treated with isolated T-cells revealed a significant increase in both the total number of cells and percent proliferating cells in the presence of Daudi cells displaying the target CD19 antigen, but a lack of significant proliferation in the presence of C4-2 cells that lacked the CD19 antigen (FIG. 12). Proliferation of CD8+ cells was very similar for bispecific molecules with the default IgG1 hinge (TSC100) as well as those with longer hinges (TSC166, TSC167, TSC168). Slightly higher CD8+ proliferation at low concentrations was observed with the bispecific with the shorter IgA2 upper hinge (TSC165). Similar, but more marked differences were observed with proliferation of CD4+ cells, wherein the molecule containing the shorter IgA2 hinge (TSC165) showed higher proliferation at most concentrations than the standard IgG1 hinge (TSC100), and molecules with longer hinges (TSC166, TSC167, TSC168) showed lower proliferation.

[0445] To confirm the differential activity of the IgA2 hinge, a second proliferation experiment was carried out with a titration to lower protein concentrations (FIG. 13), comparing the bispecific featuring the IgA2 hinge (TSC165) to two different production lots of a bispecific featuring the default IgG1 hinge (TSC127) and the bsc19×3 BiTE molecule. Similar to the previous experiment, less variation was observed with proliferation of CD8+ cells, with TSC165 showing comparable or greater induction of proliferation to bsc19×3, which in turn showed slightly higher or comparable proliferation to TSC127. Again, similar to the previous experiment, these trends repeated in a magnified fashion with the CD4+ cell proliferation, with TSC165 and bsc19×3 showing comparable proliferation, which in turn was noticeably greater than that of TSC127.

### Example 10

### Modulation of Redirected T-Cell Cytotoxicity by Polypeptide Heterodimers with Altered Hinge Sequences

[0446] to compare the effectiveness of changing hinge composition in bispecific polypeptide heterodimer molecules on inducing target-dependent T-cell cytotoxicity, five different bispecific molecules were compared in a chromium (⁵¹Cr) release assay. Five different bispecific molecules (TSC100, TSC165, TSC166, TSC167 and TSC168, as described in Example 9) with a common anti-CD19 binding domain (HD37), a common anti-CD3 binding domain (Cris7) and five different hinge constructs (IgG1 SCC-P hinge for TSC100 and TSC127, IgA2 hinge without the first Val linked to a human IgG1 core hinge for TSC165, IgG1 SSS-P hinge linked to a human IgG1 core hinge for TSC166, a portion of mutated IgG3 hinge linked to a human IgG1 core hinge for TSC167, and the IgM CH2 domain without the first Val linked to a human IgG1 core hinge for TSC168) were compared.

[0447] Daudi Burkitt's lymphoma cells (CD19+, RON−) were obtained from ATCC (Manassas, Va.) and cultured according to the provided protocol. T cells were isolated using a Pan T-cell Isolation Kit II from Miltenyi Biotec (Bergisch Gladbach, Germany) using the manufacturer's protocol (see also Example 5 for more information).

[0448] Cytotoxicity was assessed by a ⁵¹Cr release assay. Approximately 5×10⁶ Daudi cells were treated with 0.3 mCi of ⁵¹Cr and incubated for 75 minutes at 37° C. After 75 minutes, cells were washed 3 times with media (RPMI+10% FBS) and resuspended in 11.5 mL of media. From this suspension, 50 μL was dispensed per well into 96 well U-bottom plates (approximately 20,000 cells/well). Concentrations of bispecific molecules ranging from 10 nM to 0.1 pM were added to the target (Daudi) cells, bringing the total volume to 100 μL/well. Target cells were incubated at room temperature for 15 minutes. Then 100 μL of isolated T-cells (approximately 200,000) were added to bring the T-cell to target cell ratio to 10:1. 50 μL of 0.8% NP-40 was added to a control well containing target cells, left for 15 minutes, then 100 μL of media was added to provide a total lysis control.

[0449] Plates were incubated for 4 hours, spun at 1500 rpm for 3 minutes, and 25 μL of supernatant was transferred from each well to the corresponding well of a 96-well Luma sample plate. Sample plates were allowed to air dry in a chemical safety hood for 18 hours, and then radioactivity was read on a Topcount scintillation counter using a standard protocol.

[0450] Analysis of cytotoxicity data showed strong T-cell directed cytotoxicity with the Daudi cells in the presence of T-cells and the anti-CD19 directed bispecific molecules (TSC100-TSC168), reaching maximal lysis at a concentration between 5 and 50 pM (FIG. 14). Similar to the trends observed in Example 9, the bispecific molecule with a shorter IgA2 upper hinge region (TSC165) showed comparable or greater cytotoxicity to the molecule with the standard IgG1 upper hinge region (TSC100), whereas the molecules with longer upper hinge regions (TSC166, TSC167, TSC168) were less potent at inducing cytotoxicity.

### Example 11

### Bispecific Heterodimers with CH3-CH1 and CH3-Ck Linker Variations

[0451] The following bispecific heterodimers with CH3-CH1 and CH3-Ck linker variations were made:

[0452] Bispecific heterodimer TSC151 comprises single chain polypeptides TSC145 and TSC148. Single chain polypeptide TSC145 comprises from its amino to carboxyl terminus: humanized Cris7 (anti-CD3) scFv, human IgG1 SCC-P hinge, human CH2 (ADCC/CDC null), human CH3, and human IgG1 CH1. The human CH3 and human IgG1 CH1 are linked by a linker having the sequence GGGSS (SEQ ID NO:847). The nucleotide and amino acid sequences of TSC145 are set forth in SEQ ID NOS:853 and 859, respectively. Single chain polypeptide TSC148 comprises from its amino to carboxyl terminus: HD37 (anti-CD19) scFv, human IgG1 SCC-P hinge, human CH2 (ADCC/CDC null), human CH3, and human Ck (YAE). The human CH3 and human Ck (YAE) are linked with a linker having the sequence GGGSR (SEQ ID NO:850) in which R may alternatively be regarded as the first arginine of human Ck (YAE). The nucleotide and amino acid sequences of TSC148 are set forth in SEQ ID NOS:856 and 862, respectively.

[0453] Bispecific heterodimer TSC152 comprises single chain polypeptides TSC146 and TSC149. Single chain polypeptide TSC146 comprises from its amino to carboxyl terminus: humanized Cris7 (anti-CD3) scFv, human IgG1 SCC-P hinge, human CH2 (ADCC/CDC null), human CH3, and human IgG1 CH1. The human CH3 and human IgG1 CH1 are linked by a linker having the sequence SYSPNS (SEQ ID NO:848). The nucleotide and amino acid sequences of TSC146 are set forth in SEQ ID NOS:854 and 860, respectively. Single chain polypeptide TSC149 comprises from its amino to carboxyl terminus: HD37 (anti-CD19) scFv, human IgG1 SCC-P hinge, human CH2 (ADCC/CDC null), human CH3, and human Ck (YAE). The human CH3 and human Ck (YAE) are linked with a linker having the sequence SYSPNSR (SEQ ID NO:851) in which R may alternatively be regarded as the first arginine of human Ck (YAE). The nucleotide and amino acid sequences of TSC149 are set forth in SEQ ID NOS:857 and 863, respectively.

[0454] Bispecific heterodimer TSC153 comprises single chain polypeptides TSC147 and TSC150. Single chain polypeptide TSC147 comprises from its amino to carboxyl terminus: humanized Cris7 (anti-CD3) scFv, human IgG1 SCC-P hinge, human CH2 (ADCC/CDC null), human CH3, and human IgG1 CH1. The human CH3 and human IgG1 CH1 are linked by a linker having the sequence SSLNTPNS (SEQ ID NO:849). The nucleotide and amino acid sequences of TSC147 are set forth in SEQ ID NOS:855 and 861, respectively. Single chain polypeptide TSC150 comprises from its amino to carboxyl terminus: HD37 (anti-CD19) scFv, human IgG1 SCC-P hinge, human CH2 (ADCC/CDC null), human CH3, and human Ck (YAE). The human CH3 and human Ck (YAE) are linked with a linker having the sequence SSLNTPNSR (SEQ ID NO:852) in which R may alternatively be regarded as the first arginine of human Ck (YAE). The nucleotide and amino acid sequences of TSC150 are set forth in SEQ ID NOS:858 and 864, respectively.

[0455] The above bispecific heterodimers were expressed according to Example 1. The following expression levels were obtained: 9.2 μg protein/ml of culture for TSC151, 11.2 μg protein/ml of culture for TSC152, and 14.7 μg protein/ml of culture for TSC153. In comparison, about 6 μg protein/ml of culture was obtained for heterodimers with a CH3-CH1 and CH3-Ck linker having the amino acid sequence KSR (SEQ ID NO:846).

[0456] The various embodiments described above can be combined to provide further embodiments. All of the U.S. patents, U.S. patent application publications, U.S. patent applications, foreign patents, foreign patent applications and non-patent publications referred to in this specification and/or listed in the Application Data Sheet, are incorporated herein by reference, in their entirety. Aspects of the embodiments can be modified, if necessary to employ concepts of the various patents, applications and publications to provide yet further embodiments.

[0457] These and other changes can be made to the embodiments in light of the above-detailed description. In general, in the following claims, the terms used should not be construed to limit the claims to the specific embodiments disclosed in the specification and the claims, but should be construed to include all possible embodiments along with the full scope of equivalents to which such claims are entitled. Accordingly, the claims are not limited by the disclosure.

The application's sequence listing, which the Patent Office published only in electronic form, follows.

SEQUENCE LISTING (882 sequences)

SEQ ID NO: 1 - DNA, 2088 bp, Artificial Sequence
  nucleotide sequence of 2E12CH1CH2CH3Ck (X0130)
caggtgcagctgaaggagtcaggacctggcagcgtggcgccctcacagagcctgtccatcacatgcaccgtctcagggttctcattaaccggctatggtgtaaactgggttcgccagcctccaggaaagggtctggagtggctgggaatgatatggggtgatggaagcacagactataattcagctctcaaatccagactatcgatcaccaaggacaactccaagagccaagttttcttaaaaatgaacagtctgcaaactgatgacacagccagatactactgtgctcgggatggttatagtaactttcattactatgttatggactactggggtcaaggaacctcagtcaccgtctcctctgggggtggaggctctggtggcggtggatccggcggaggtgggtcgggtggcggcggatctgacattgtgctcacccaatctccagcttctttggctgtgtctctaggtcagagagccaccatctcctgcagagccagtgaaagtgttgaatattatgtcacaagtttaatgcagtggtaccaacagaaaccaggacagccacccaaactcctcatctctgctgctagcaacgtagaatctggggtccctgccaggtttagtggcagtgggtctgggacagactttagcctcaacatccatcctgtggaggaggatgatattgcaatgtatttctgtcagcaaagtaggaaggttccatggacgttcggtggaggcaccaagctggaaatcaagtcctcgagcgcctccaccaagggcccatcggtcttccccctggcaccctcctccaagagcacctctgggggcacagcggccctgggctgcctggtcaaggactacttccccgagccggtgacggtgtcgtggaactcaggcgccctgaccagcggcgtgcacaccttcccggctgtcctacagtcctcaggactctactccctcagcagcgtggtgaccgtgccctccagcagcttgggcacccagacctacatctgcaacgtgaatcacaagcccagcaacaccaaggtggacaagaaagttcgtacggagcccaaatcttctgacaaaactcacacatgcccaccgtgcccatccggagcacctgaactcctgggtggaccgtcagtcttcctcttccccccaaaacccaaggacaccctcatgatctcccggacccctgaggtcacatgcgtggtggtggacgtgagccacgaagaccctgaggtcaagttcaactggtacgtggacggcgtggaggtgcataatgccaagacaaagccgcgggaggagcagtacaacagcacgtaccgtgtggtcagcgtcctcaccgtcctgcaccaggactggctgaatggcaaggagtacaagtgcaaggtctccaacaaagccctcccagcccccatcgagaaaaccatctccaaagccaaagggcagccccgagaaccacaggtgtacaccctgcccccatcccgggatgagctgaccaagaaccaggtcagcctgacctgcctggtcaaaggcttctatccaagcgacatcgccgtggagtgggagagcaatgggcagccggagaacaactacaagaccacgcctcccgtgctggactccgacggctccttcttcctctacagcaagctcaccgtggacaagagcaggtggcagcaggggaacgtcttctcatgctccgtgatgcatgaggctctgcacaaccactacacgcagaagagcctctccctgtctccgggtaaatctagaactgtggctgcaccatctgtcttcatcttcccgccatctgatgagcagttgaaatctggaactgcctctgttgtgtgcctgctgaataacttctatcccagagaggccaaagtacagtggaaggtggataacgccctccaatcgggtaactcccaggagagtgtcacagagcaggacagcaaggacagcacctacagcctcagcagcaccctgacgctgagcaaagcagactacgagaaacacaaagtctacgcctgcgaagtcacccatcagggcctgagctcgcccgtcacaaagagcttcaacaggggagag

SEQ ID NO: 2 - protein, 696 aa, Artificial Sequence
  amino acid sequence of 2E12CH1CH2CH3Ck (X0130)
QVQLKESGPGSVAPSQSLSITCTVSGFSLTGYGVNWVRQPPGKGLEWLGMIWGDGSTDYNSALKSRLSITKDNSKSQVFLKMNSLQTDDTARYYCARDGYSNFHYYVMDYWGQGTSVTVSSGGGGSGGGGSGGGGSGGGGSDIVLTQSPASLAVSLGQRATISCRASESVEYYVTSLMQWYQQKPGQPPKLLISAASNVESGVPARFSGSGSGTDFSLNIHPVEEDDIAMYFCQQSRKVPWTFGGGTKLEIKSSSASTKGPSVFPLAPSSKSTSGGTAALGCLVKDYFPEPVTVSWNSGALTSGVHTFPAVLQSSGLYSLSSVVTVPSSSLGTQTYICNVNHKPSNTKVDKKVRTEPKSSDKTHTCPPCPSGAPELLGGPSVFLFPPKPKDTLMISRTPEVTCVVVDVSHEDPEVKFNWYVDGVEVHNAKTKPREEQYNSTYRVVSVLTVLHQDWLNGKEYKCKVSNKALPAPIEKTISKAKGQPREPQVYTLPPSRDELTKNQVSLTCLVKGFYPSDIAVEWESNGQPENNYKTTPPVLDSDGSFFLYSKLTVDKSRWQQGNVFSCSVMHEALHNHYTQKSLSLSPGKSRTVAAPSVFIFPPSDEQLKSGTASVVCLLNNFYPREAKVQWKVDNALQSGNSQESVTEQDSKDSTYSLSSTLTLSKADYEKHKVYACEVTHQGLSSPVTKSFNRGE

SEQ ID NO: 3 - DNA, 2142 bp, Artificial Sequence
  Nucleotide sequence of  CKCH2CH3CH1-H68-2E12 (X0168)
actgtggctgcaccatctgtcttcatcttcccgccatctgatgagcagttgaaatctggaactgcctctgttgtgtgcctgctgaataacttctatcccagagaggccaaagtacagtggaaggtggataacgccctccaatcgggtaactcccaggagagtgtcacagagcaggacagcaaggacagcacctacagcctcagcagcaccctgacgctgagcaaagcagactacgagaaacacaaagtctacgcctgcgaagtcacccatcagggcctgagctcgcccgtcacaaagagcttcaacaggggagagcgtacggagcccaaatcttctgacaaaactcacacatgcccaccgtgcccatccggagcacctgaactcctgggtggaccgtcagtcttcctcttccccccaaaacccaaggacaccctcatgatctcccggacccctgaggtcacatgcgtggtggtggacgtgagccacgaagaccctgaggtcaagttcaactggtacgtggacggcgtggaggtgcataatgccaagacaaagccgcgggaggagcagtacaacagcacgtaccgtgtggtcagcgtcctcaccgtcctgcaccaggactggctgaatggcaaggagtacaagtgcaaggtctccaacaaagccctcccagcccccatcgagaaaaccatctccaaagccaaagggcagccccgagaaccacaggtgtacaccctgcccccatcccgggatgagctgaccaagaaccaggtcagcctgacctgcctggtcaaaggcttctatccaagcgacatcgccgtggagtgggagagcaatgggcagccggagaacaactacaagaccacgcctcccgtgctggactccgacggctccttcttcctctacagcaagctcaccgtggacaagagcaggtggcagcaggggaacgtcttctcatgctccgtgatgcatgaggctctgcacaaccactacacgcagaagagcctctccctgtctccgggtaaatctagagcctccaccaagggcccatcggtcttccccctggcaccctcctccaagagcacctctgggggcacagcggccctgggctgcctggtcaaggactacttccccgagccggtgacggtgtcgtggaactcaggcgccctgaccagcggcgtgcacaccttcccggctgtcctacagtcctcaggactctactccctcagcagcgtggtgaccgtgccctccagcagcttgggcacccagacctacatctgcaacgtgaatcacaagcccagcaacaccaaggtggacaagaaagttaactcattattcaaccaagaagttcaaattcccttgaccgaaagttacagcccgaattctcaggtgcagctgaaggagtcaggacctggcagcgtggcgccctcacagagcctgtccatcacatgcaccgtctcagggttctcattaaccggctatggtgtaaactgggttcgccagcctccaggaaagggtctggagtggctgggaatgatatggggtgatggaagcacagactataattcagctctcaaatccagactatcgatcaccaaggacaactccaagagccaagttttcttaaaaatgaacagtctgcaaactgatgacacagccagatactactgtgctcgggatggttatagtaactttcattactatgttatggactactggggtcaaggaacctcagtcaccgtctcctctgggggtggaggctctggtggcggtggatccggcggaggtgggtcgggtggcggcggatctgacattgtgctcacccaatctccagcttctttggctgtgtctctaggtcagagagccaccatctcctgcagagccagtgaaagtgttgaatattatgtcacaagtttaatgcagtggtaccaacagaaaccaggacagccacccaaactcctcatctctgctgctagcaacgtagaatctggggtccctgccaggtttagtggcagtgggtctgggacagactttagcctcaacatccatcctgtggaggaggatgatattgcaatgtatttctgtcagcaaagtaggaaggttccatggacgttcggtggaggcaccaagctggaaatcaagtga

SEQ ID NO: 4 - protein, 713 aa, Artificial Sequence
  Amino acid sequence of  CKCH2CH3CH1-H68-2E12 (X0168)
TVAAPSVFIFPPSDEQLKSGTASVVCLLNNFYPREAKVQWKVDNALQSGNSQESVTEQDSKDSTYSLSSTLTLSKADYEKHKVYACEVTHQGLSSPVTKSFNRGERTEPKSSDKTHTCPPCPSGAPELLGGPSVFLFPPKPKDTLMISRTPEVTCVVVDVSHEDPEVKFNWYVDGVEVHNAKTKPREEQYNSTYRVVSVLTVLHQDWLNGKEYKCKVSNKALPAPIEKTISKAKGQPREPQVYTLPPSRDELTKNQVSLTCLVKGFYPSDIAVEWESNGQPENNYKTTPPVLDSDGSFFLYSKLTVDKSRWQQGNVFSCSVMHEALHNHYTQKSLSLSPGKSRASTKGPSVFPLAPSSKSTSGGTAALGCLVKDYFPEPVTVSWNSGALTSGVHTFPAVLQSSGLYSLSSVVTVPSSSLGTQTYICNVNHKPSNTKVDKKVNSLFNQEVQIPLTESYSPNSQVQLKESGPGSVAPSQSLSITCTVSGFSLTGYGVNWVRQPPGKGLEWLGMIWGDGSTDYNSALKSRLSITKDNSKSQVFLKMNSLQTDDTARYYCARDGYSNFHYYVMDYWGQGTSVTVSSGGGGSGGGGSGGGGSGGGGSDIVLTQSPASLAVSLGQRATISCRASESVEYYVTSLMQWYQQKPGQPPKLLISAASNVESGVPARFSGSGSGTDFSLNIHPVEEDDIAMYFCQQSRKVPWTFGGGTKLEIK

SEQ ID NO: 5 - DNA, 1770 bp, Artificial Sequence
  Nucleotide sequence of 2E12CH1CH2CH3 (X0112)
caggtgcagctgaaggagtcaggacctggcagcgtggcgccctcacagagcctgtccatcacatgcaccgtctcagggttctcattaaccggctatggtgtaaactgggttcgccagcctccaggaaagggtctggagtggctgggaatgatatggggtgatggaagcacagactataattcagctctcaaatccagactatcgatcaccaaggacaactccaagagccaagttttcttaaaaatgaacagtctgcaaactgatgacacagccagatactactgtgctcgggatggttatagtaactttcattactatgttatggactactggggtcaaggaacctcagtcaccgtctcctctgggggtggaggctctggtggcggtggatccggcggaggtgggtcgggtggcggcggatctgacattgtgctcacccaatctccagcttctttggctgtgtctctaggtcagagagccaccatctcctgcagagccagtgaaagtgttgaatattatgtcacaagtttaatgcagtggtaccaacagaaaccaggacagccacccaaactcctcatctctgctgctagcaacgtagaatctggggtccctgccaggtttagtggcagtgggtctgggacagactttagcctcaacatccatcctgtggaggaggatgatattgcaatgtatttctgtcagcaaagtaggaaggttccatggacgttcggtggaggcaccaagctggaaatcaagtcctcgagcgcctccaccaagggcccatcggtcttccccctggcaccctcctccaagagcacctctgggggcacagcggccctgggctgcctggtcaaggactacttccccgagccggtgacggtgtcgtggaactcaggcgccctgaccagcggcgtgcacaccttcccggctgtcctacagtcctcaggactctactccctcagcagcgtggtgaccgtgccctccagcagcttgggcacccagacctacatctgcaacgtgaatcacaagcccagcaacaccaaggtggacaagaaagttcgtacggagcccaaatcttctgacaaaactcacacatgcccaccgtgcccatccggagcacctgaactcctgggtggaccgtcagtcttcctcttccccccaaaacccaaggacaccctcatgatctcccggacccctgaggtcacatgcgtggtggtggacgtgagccacgaagaccctgaggtcaagttcaactggtacgtggacggcgtggaggtgcataatgccaagacaaagccgcgggaggagcagtacaacagcacgtaccgtgtggtcagcgtcctcaccgtcctgcaccaggactggctgaatggcaaggagtacaagtgcaaggtctccaacaaagccctcccagcccccatcgagaaaaccatctccaaagccaaagggcagccccgagaaccacaggtgtacaccctgcccccatcccgggatgagctgaccaagaaccaggtcagcctgacctgcctggtcaaaggcttctatccaagcgacatcgccgtggagtgggagagcaatgggcagccggagaacaactacaagaccacgcctcccgtgctggactccgacggctccttcttcctctacagcaagctcaccgtggacaagagcaggtggcagcaggggaacgtcttctcatgctccgtgatgcatgaggctctgcacaaccactacacgcagaagagcctctccctgtctccgggtaaatga

SEQ ID NO: 6 - protein, 589 aa, Artificial Sequence
  Amino acid sequence of 2E12CH1CH2CH3 (X0112)
QVQLKESGPGSVAPSQSLSITCTVSGFSLTGYGVNWVRQPPGKGLEWLGMIWGDGSTDYNSALKSRLSITKDNSKSQVFLKMNSLQTDDTARYYCARDGYSNFHYYVMDYWGQGTSVTVSSGGGGSGGGGSGGGGSGGGGSDIVLTQSPASLAVSLGQRATISCRASESVEYYVTSLMQWYQQKPGQPPKLLISAASNVESGVPARFSGSGSGTDFSLNIHPVEEDDIAMYFCQQSRKVPWTFGGGTKLEIKSSSASTKGPSVFPLAPSSKSTSGGTAALGCLVKDYFPEPVTVSWNSGALTSGVHTFPAVLQSSGLYSLSSVVTVPSSSLGTQTYICNVNHKPSNTKVDKKVRTEPKSSDKTHTCPPCPSGAPELLGGPSVFLFPPKPKDTLMISRTPEVTCVVVDVSHEDPEVKFNWYVDGVEVHNAKTKPREEQYNSTYRVVSVLTVLHQDWLNGKEYKCKVSNKALPAPIEKTISKAKGQPREPQVYTLPPSRDELTKNQVSLTCLVKGFYPSDIAVEWESNGQPENNYKTTPPVLDSDGSFFLYSKLTVDKSRWQQGNVFSCSVMHEALHNHYTQKSLSLSPGK

SEQ ID NO: 7 - DNA, 1026 bp, Artificial Sequence
  Nucleotide sequence of CkCH2CH3 (X0113)
actgtggctgcaccatctgtcttcatcttcccgccatctgatgagcagttgaaatctggaactgcctctgttgtgtgcctgctgaataacttctatcccagagaggccaaagtacagtggaaggtggataacgccctccaatcgggtaactcccaggagagtgtcacagagcaggacagcaaggacagcacctacagcctcagcagcaccctgacgctgagcaaagcagactacgagaaacacaaagtctacgcctgcgaagtcacccatcagggcctgagctcgcccgtcacaaagagcttcaacaggggagagcgtacggagcccaaatcttctgacaaaactcacacatgcccaccgtgcccatccggagcacctgaactcctgggtggaccgtcagtcttcctcttccccccaaaacccaaggacaccctcatgatctcccggacccctgaggtcacatgcgtggtggtggacgtgagccacgaagaccctgaggtcaagttcaactggtacgtggacggcgtggaggtgcataatgccaagacaaagccgcgggaggagcagtacaacagcacgtaccgtgtggtcagcgtcctcaccgtcctgcaccaggactggctgaatggcaaggagtacaagtgcaaggtctccaacaaagccctcccagcccccatcgagaaaaccatctccaaagccaaagggcagccccgagaaccacaggtgtacaccctgcccccatcccgggatgagctgaccaagaaccaggtcagcctgacctgcctggtcaaaggcttctatccaagcgacatcgccgtggagtgggagagcaatgggcagccggagaacaactacaagaccacgcctcccgtgctggactccgacggctccttcttcctctacagcaagctcaccgtggacaagagcaggtggcagcaggggaacgtcttctcatgctccgtgatgcatgaggctctgcacaaccactacacgcagaagagcctctccctgtctccgggtaaatga

SEQ ID NO: 8 - protein, 341 aa, Artificial Sequence
  Amino acid sequence of CkCH2CH3 (X0113)
TVAAPSVFIFPPSDEQLKSGTASVVCLLNNFYPREAKVQWKVDNALQSGNSQESVTEQDSKDSTYSLSSTLTLSKADYEKHKVYACEVTHQGLSSPVTKSFNRGERTEPKSSDKTHTCPPCPSGAPELLGGPSVFLFPPKPKDTLMISRTPEVTCVVVDVSHEDPEVKFNWYVDGVEVHNAKTKPREEQYNSTYRVVSVLTVLHQDWLNGKEYKCKVSNKALPAPIEKTISKAKGQPREPQVYTLPPSRDELTKNQVSLTCLVKGFYPSDIAVEWESNGQPENNYKTTPPVLDSDGSFFLYSKLTVDKSRWQQGNVFSCSVMHEALHNHYTQKSLSLSPGK

SEQ ID NO: 9 - DNA, 1839 bp, Artificial Sequence
  Nucleotide sequence of Ck(YAE) Fc (N297A) 2E12 (X0244)
actgtggctgcaccatctgtcttcatcttcccgccatctgatgagcagttgaaatctggaactgcctctgttgtgtgcctgctgaattacttctatcccagagaggccaaagtacagtggaaggtggataacgccctccaatcgggtaactcccaggagagtgccacagagcaggacagcaaggacagcacctacagcctcagcagcgagctgacgctgagcaaagcagactacgagaaacacaaagtctacgcctgcgaagtcacccatcagggcctgagctcgcccgtcacaaagagcttcaacaggggagagcgtacggagcccaaatcttctgacaaaactcacacatgcccaccgtgcccatccggagcacctgaactcctgggtggaccgtcagtcttcctcttccccccaaaacccaaggacaccctcatgatctcccggacccctgaggtcacatgcgtggtggtggacgtgagccacgaagaccctgaggtcaagttcaactggtacgtggacggcgtggaggtgcataatgccaagacaaagccgcgggaggagcagtacgccagcacgtaccgtgtggtcagcgtcctcaccgtcctgcaccaggactggctgaatggcaaggagtacaagtgcaaggtctccaacaaagccctcccagcccccatcgagaaaaccatctccaaagccaaagggcagccccgagaaccacaggtgtacaccctgcccccatcccgggatgagctgaccaagaaccaggtcagcctgacctgcctggtcaaaggcttctatccaagcgacatcgccgtggagtgggagagcaatgggcagccggagaacaactacaagaccacgcctcccgtgctggactccgacggctccttcttcctctacagcaagctcaccgtggacaagagcaggtggcagcaggggaacgtcttctcatgctccgtgatgcatgaggctctgcacaaccactacacgcagaagagcctctccctgtctccgggtaactcattattcaaccaagaagttcaaattcccttgaccgaaagttacagcccgaattctcaggtgcagctgaaggagtcaggacctggcagcgtggcgccctcacagagcctgtccatcacatgcaccgtctcagggttctcattaaccggctatggtgtaaactgggttcgccagcctccaggaaagggtctggagtggctgggaatgatatggggtgatggaagcacagactataattcagctctcaaatccagactatcgatcaccaaggacaactccaagagccaagttttcttaaaaatgaacagtctgcaaactgatgacacagccagatactactgtgctcgggatggttatagtaactttcattactatgttatggactactggggtcaaggaacctcagtcaccgtctcctctgggggtggaggctctggtggcggtggatccggcggaggtgggtcgggtggcggcggatctgacattgtgctcacccaatctccagcttctttggctgtgtctctaggtcagagagccaccatctcctgcagagccagtgaaagtgttgaatattatgtcacaagtttaatgcagtggtaccaacagaaaccaggacagccacccaaactcctcatctctgctgctagcaacgtagaatctggggtccctgccaggtttagtggcagtgggtctgggacagactttagcctcaacatccatcctgtggaggaggatgatattgcaatgtatttctgtcagcaaagtaggaaggttccatggacgttcggtggaggcaccaagctggaaatcaagtga

SEQ ID NO: 10 - protein, 612 aa, Artificial Sequence
  Amino acid sequence of Ck(YAE) Fc (N297A) 2E12 (X0244)
TVAAPSVFIFPPSDEQLKSGTASVVCLLNYFYPREAKVQWKVDNALQSGNSQESATEQDSKDSTYSLSSELTLSKADYEKHKVYACEVTHQGLSSPVTKSFNRGERTEPKSSDKTHTCPPCPSGAPELLGGPSVFLFPPKPKDTLMISRTPEVTCVVVDVSHEDPEVKFNWYVDGVEVHNAKTKPREEQYASTYRVVSVLTVLHQDWLNGKEYKCKVSNKALPAPIEKTISKAKGQPREPQVYTLPPSRDELTKNQVSLTCLVKGFYPSDIAVEWESNGQPENNYKTTPPVLDSDGSFFLYSKLTVDKSRWQQGNVFSCSVMHEALHNHYTQKSLSLSPGNSLFNQEVQIPLTESYSPNSQVQLKESGPGSVAPSQSLSITCTVSGFSLTGYGVNWVRQPPGKGLEWLGMIWGDGSTDYNSALKSRLSITKDNSKSQVFLKMNSLQTDDTARYYCARDGYSNFHYYVMDYWGQGTSVTVSSGGGGSGGGGSGGGGSGGGGSDIVLTQSPASLAVSLGQRATISCRASESVEYYVTSLMQWYQQKPGQPPKLLISAASNVESGVPARFSGSGSGTDFSLNIHPVEEDDIAMYFCQQSRKVPWTFGGGTKLEIK

SEQ ID NO: 11 - DNA, 1770 bp, Artificial Sequence
  Nucleotide sequence of 2E12 CH1 Fc (N297A) (X0245)
caggtgcagctgaaggagtcaggacctggcagcgtggcgccctcacagagcctgtccatcacatgcaccgtctcagggttctcattaaccggctatggtgtaaactgggttcgccagcctccaggaaagggtctggagtggctgggaatgatatggggtgatggaagcacagactataattcagctctcaaatccagactatcgatcaccaaggacaactccaagagccaagttttcttaaaaatgaacagtctgcaaactgatgacacagccagatactactgtgctcgggatggttatagtaactttcattactatgttatggactactggggtcaaggaacctcagtcaccgtctcctctgggggtggaggctctggtggcggtggatccggcggaggtgggtcgggtggcggcggatctgacattgtgctcacccaatctccagcttctttggctgtgtctctaggtcagagagccaccatctcctgcagagccagtgaaagtgttgaatattatgtcacaagtttaatgcagtggtaccaacagaaaccaggacagccacccaaactcctcatctctgctgctagcaacgtagaatctggggtccctgccaggtttagtggcagtgggtctgggacagactttagcctcaacatccatcctgtggaggaggatgatattgcaatgtatttctgtcagcaaagtaggaaggttccatggacgttcggtggaggcaccaagctggaaatcaagtcctcgagcgcctccaccaagggcccatcggtcttccccctggcaccctcctccaagagcacctctgggggcacagcggccctgggctgcctggtcaaggactacttccccgagccggtgacggtgtcgtggaactcaggcgccctgaccagcggcgtgcacaccttcccggctgtcctacagtcctcaggactctactccctcagcagcgtggtgaccgtgccctccagcagcttgggcacccagacctacatctgcaacgtgaatcacaagcccagcaacaccaaggtggacaagaaagttcgtacggagcccaaatcttctgacaaaactcacacatgcccaccgtgcccatccggagcacctgaactcctgggtggaccgtcagtcttcctcttccccccaaaacccaaggacaccctcatgatctcccggacccctgaggtcacatgcgtggtggtggacgtgagccacgaagaccctgaggtcaagttcaactggtacgtggacggcgtggaggtgcataatgccaagacaaagccgcgggaggagcagtacgccagcacgtaccgtgtggtcagcgtcctcaccgtcctgcaccaggactggctgaatggcaaggagtacaagtgcaaggtctccaacaaagccctcccagcccccatcgagaaaaccatctccaaagccaaagggcagccccgagaaccacaggtgtacaccctgcccccatcccgggatgagctgaccaagaaccaggtcagcctgacctgcctggtcaaaggcttctatccaagcgacatcgccgtggagtgggagagcaatgggcagccggagaacaactacaagaccacgcctcccgtgctggactccgacggctccttcttcctctacagcaagctcaccgtggacaagagcaggtggcagcaggggaacgtcttctcatgctccgtgatgcatgaggctctgcacaaccactacacgcagaagagcctctccctgtctccgggtaaatga

SEQ ID NO: 12 - protein, 589 aa, Artificial Sequence
  Amino acid sequence of 2E12 CH1 Fc (N297A) (X0245)
QVQLKESGPGSVAPSQSLSITCTVSGFSLTGYGVNWVRQPPGKGLEWLGMIWGDGSTDYNSALKSRLSITKDNSKSQVFLKMNSLQTDDTARYYCARDGYSNFHYYVMDYWGQGTSVTVSSGGGGSGGGGSGGGGSGGGGSDIVLTQSPASLAVSLGQRATISCRASESVEYYVTSLMQWYQQKPGQPPKLLISAASNVESGVPARFSGSGSGTDFSLNIHPVEEDDIAMYFCQQSRKVPWTFGGGTKLEIKSSSASTKGPSVFPLAPSSKSTSGGTAALGCLVKDYFPEPVTVSWNSGALTSGVHTFPAVLQSSGLYSLSSVVTVPSSSLGTQTYICNVNHKPSNTKVDKKVRTEPKSSDKTHTCPPCPSGAPELLGGPSVFLFPPKPKDTLMISRTPEVTCVVVDVSHEDPEVKFNWYVDGVEVHNAKTKPREEQYASTYRVVSVLTVLHQDWLNGKEYKCKVSNKALPAPIEKTISKAKGQPREPQVYTLPPSRDELTKNQVSLTCLVKGFYPSDIAVEWESNGQPENNYKTTPPVLDSDGSFFLYSKLTVDKSRWQQGNVFSCSVMHEALHNHYTQKSLSLSPGK

SEQ ID NO: 13 - DNA, 1749 bp, Artificial Sequence
  Nucleotide sequence of P2C2 Ck(YAE) Fc (N297A) (X0246)
gatattgtgatgatccaggatgaactctccaatcctgtcagttctggagaatcagtttccatctcctgtaggtctagtaagagtctcctagataaggaagggaagacatacttgaattggtttctgcagagaccaggacaatctcctcagctcctgatctatctgatgtccatgcgtgaatcaggagtctcagaccggtttagtggcagtgggtcaggaacagatttcaccctggaaatcagtagagtgaaggctgaggatgtgggtgtgtattactgtcaacaacttgtagagtatccgtggacgttcggtggaggcaccaagctggaaatcaaaggtggcggtggctctggcggaggtggatccggtggcggcggctctcagatccagttggtgcagtctggacctgagctgaagaagcctggagagacagtcaagatctcctgcaaggcttctggttataccttcacagacttttcaatgcactgggtgaggcaggctccaggaaagggtttaaagtggatgggctggataaacactgagactggtgagccaacatatgcagatgacttcaggggacggtttgccttctctttggaaacttctgccagcactgcctatttgcagatcaacaacctcaaaaatgaggacacggctacatatttttgtacctggtctgcttactggggccaagggactctggtcactgtctctgcctcgagcactgtggctgcaccatctgtcttcatcttcccgccatctgatgagcagttgaaatctggaactgcctctgttgtgtgcctgctgaattacttctatcccagagaggccaaagtacagtggaaggtggataacgccctccaatcgggtaactcccaggagagtgccacagagcaggacagcaaggacagcacctacagcctcagcagcgagctgacgctgagcaaagcagactacgagaaacacaaagtctacgcctgcgaagtcacccatcagggcctgagctcgcccgtcacaaagagcttcaacaggggagagcgtacggagcccaaatcttctgacaaaactcacacatgcccaccgtgcccatccggagcacctgaactcctgggtggaccgtcagtcttcctcttccccccaaaacccaaggacaccctcatgatctcccggacccctgaggtcacatgcgtggtggtggacgtgagccacgaagaccctgaggtcaagttcaactggtacgtggacggcgtggaggtgcataatgccaagacaaagccgcgggaggagcagtacgccagcacgtaccgtgtggtcagcgtcctcaccgtcctgcaccaggactggctgaatggcaaggagtacaagtgcaaggtctccaacaaagccctcccagcccccatcgagaaaaccatctccaaagccaaagggcagccccgagaaccacaggtgtacaccctgcccccatcccgggatgagctgaccaagaaccaggtcagcctgacctgcctggtcaaaggcttctatccaagcgacatcgccgtggagtgggagagcaatgggcagccggagaacaactacaagaccacgcctcccgtgctggactccgacggctccttcttcctctacagcaagctcaccgtggacaagagcaggtggcagcaggggaacgtcttctcatgctccgtgatgcatgaggctctgcacaaccactacacgcagaagagcctctccctgtctccgggtaaatga

SEQ ID NO: 14 - protein, 582 aa, Artificial Sequence
  amino acid sequence of P2C2 Ck(YAE) Fc (N297A) (X0246)
DIVMIQDELSNPVSSGESVSISCRSSKSLLDKEGKTYLNWFLQRPGQSPQLLIYLMSMRESGVSDRFSGSGSGTDFTLEISRVKAEDVGVYYCQQLVEYPWTFGGGTKLEIKGGGGSGGGGSGGGGSQIQLVQSGPELKKPGETVKISCKASGYTFTDFSMHWVRQAPGKGLKWMGWINTETGEPTYADDFRGRFAFSLETSASTAYLQINNLKNEDTATYFCTWSAYWGQGTLVTVSASSTVAAPSVFIFPPSDEQLKSGTASVVCLLNYFYPREAKVQWKVDNALQSGNSQESATEQDSKDSTYSLSSELTLSKADYEKHKVYACEVTHQGLSSPVTKSFNRGERTEPKSSDKTHTCPPCPSGAPELLGGPSVFLFPPKPKDTLMISRTPEVTCVVVDVSHEDPEVKFNWYVDGVEVHNAKTKPREEQYASTYRVVSVLTVLHQDWLNGKEYKCKVSNKALPAPIEKTISKAKGQPREPQVYTLPPSRDELTKNQVSLTCLVKGFYPSDIAVEWESNGQPENNYKTTPPVLDSDGSFFLYSKLTVDKSRWQQGNVFSCSVMHEALHNHYTQKSLSLSPGK

SEQ ID NO: 15 - DNA, 2583 bp, Artificial Sequence
  Nucleotide sequence of 2E12 CH1 Fc (N297A) H68 2E12 (X0247)
caggtgcagctgaaggagtcaggacctggcagcgtggcgccctcacagagcctgtccatcacatgcaccgtctcagggttctcattaaccggctatggtgtaaactgggttcgccagcctccaggaaagggtctggagtggctgggaatgatatggggtgatggaagcacagactataattcagctctcaaatccagactatcgatcaccaaggacaactccaagagccaagttttcttaaaaatgaacagtctgcaaactgatgacacagccagatactactgtgctcgggatggttatagtaactttcattactatgttatggactactggggtcaaggaacctcagtcaccgtctcctctgggggtggaggctctggtggcggtggatccggcggaggtgggtcgggtggcggcggatctgacattgtgctcacccaatctccagcttctttggctgtgtctctaggtcagagagccaccatctcctgcagagccagtgaaagtgttgaatattatgtcacaagtttaatgcagtggtaccaacagaaaccaggacagccacccaaactcctcatctctgctgctagcaacgtagaatctggggtccctgccaggtttagtggcagtgggtctgggacagactttagcctcaacatccatcctgtggaggaggatgatattgcaatgtatttctgtcagcaaagtaggaaggttccatggacgttcggtggaggcaccaagctggaaatcaagtcctcgagcgcctccaccaagggcccatcggtcttccccctggcaccctcctccaagagcacctctgggggcacagcggccctgggctgcctggtcaaggactacttccccgagccggtgacggtgtcgtggaactcaggcgccctgaccagcggcgtgcacaccttcccggctgtcctacagtcctcaggactctactccctcagcagcgtggtgaccgtgccctccagcagcttgggcacccagacctacatctgcaacgtgaatcacaagcccagcaacaccaaggtggacaagaaagttcgtacggagcccaaatcttctgacaaaactcacacatgcccaccgtgcccatccggagcacctgaactcctgggtggaccgtcagtcttcctcttccccccaaaacccaaggacaccctcatgatctcccggacccctgaggtcacatgcgtggtggtggacgtgagccacgaagaccctgaggtcaagttcaactggtacgtggacggcgtggaggtgcataatgccaagacaaagccgcgggaggagcagtacgccagcacgtaccgtgtggtcagcgtcctcaccgtcctgcaccaggactggctgaatggcaaggagtacaagtgcaaggtctccaacaaagccctcccagcccccatcgagaaaaccatctccaaagccaaagggcagccccgagaaccacaggtgtacaccctgcccccatcccgggatgagctgaccaagaaccaggtcagcctgacctgcctggtcaaaggcttctatccaagcgacatcgccgtggagtgggagagcaatgggcagccggagaacaactacaagaccacgcctcccgtgctggactccgacggctccttcttcctctacagcaagctcaccgtggacaagagcaggtggcagcaggggaacgtcttctcatgctccgtgatgcatgaggctctgcacaaccactacacgcagaagagcctctccctgtctccgggtaactcattattcaaccaagaagttcaaattcccttgaccgaaagttacagcccgaattctcaggtgcagctgaaggagtcaggacctggcagcgtggcgccctcacagagcctgtccatcacatgcaccgtctcagggttctcattaaccggctatggtgtaaactgggttcgccagcctccaggaaagggtctggagtggctgggaatgatatggggtgatggaagcacagactataattcagctctcaaatccagactatcgatcaccaaggacaactccaagagccaagttttcttaaaaatgaacagtctgcaaactgatgacacagccagatactactgtgctcgggatggttatagtaactttcattactatgttatggactactggggtcaaggaacctcagtcaccgtctcctctgggggtggaggctctggtggcggtggatccggcggaggtgggtcgggtggcggcggatctgacattgtgctcacccaatctccagcttctttggctgtgtctctaggtcagagagccaccatctcctgcagagccagtgaaagtgttgaatattatgtcacaagtttaatgcagtggtaccaacagaaaccaggacagccacccaaactcctcatctctgctgctagcaacgtagaatctggggtccctgccaggtttagtggcagtgggtctgggacagactttagcctcaacatccatcctgtggaggaggatgatattgcaatgtatttctgtcagcaaagtaggaaggttccatggacgttcggtggaggcaccaagctggaaatcaagtga

SEQ ID NO: 16 - protein, 860 aa, Artificial Sequence
  Amino acid sequence of 2E12 CH1 Fc (N297A) H68 2E12 (X0247)
QVQLKESGPGSVAPSQSLSITCTVSGFSLTGYGVNWVRQPPGKGLEWLGMIWGDGSTDYNSALKSRLSITKDNSKSQVFLKMNSLQTDDTARYYCARDGYSNFHYYVMDYWGQGTSVTVSSGGGGSGGGGSGGGGSGGGGSDIVLTQSPASLAVSLGQRATISCRASESVEYYVTSLMQWYQQKPGQPPKLLISAASNVESGVPARFSGSGSGTDFSLNIHPVEEDDIAMYFCQQSRKVPWTFGGGTKLEIKSSSASTKGPSVFPLAPSSKSTSGGTAALGCLVKDYFPEPVTVSWNSGALTSGVHTFPAVLQSSGLYSLSSVVTVPSSSLGTQTYICNVNHKPSNTKVDKKVRTEPKSSDKTHTCPPCPSGAPELLGGPSVFLFPPKPKDTLMISRTPEVTCVVVDVSHEDPEVKFNWYVDGVEVHNAKTKPREEQYASTYRVVSVLTVLHQDWLNGKEYKCKVSNKALPAPIEKTISKAKGQPREPQVYTLPPSRDELTKNQVSLTCLVKGFYPSDIAVEWESNGQPENNYKTTPPVLDSDGSFFLYSKLTVDKSRWQQGNVFSCSVMHEALHNHYTQKSLSLSPGNSLFNQEVQIPLTESYSPNSQVQLKESGPGSVAPSQSLSITCTVSGFSLTGYGVNWVRQPPGKGLEWLGMIWGDGSTDYNSALKSRLSITKDNSKSQVFLKMNSLQTDDTARYYCARDGYSNFHYYVMDYWGQGTSVTVSSGGGGSGGGGSGGGGSGGGGSDIVLTQSPASLAVSLGQRATISCRASESVEYYVTSLMQWYQQKPGQPPKLLISAASNVESGVPARFSGSGSGTDFSLNIHPVEEDDIAMYFCQQSRKVPWTFGGGTKLEIK

SEQ ID NO: 17 - DNA, 2547 bp, Artificial Sequence
  Nucleotide sequence of P2C2 CK(YAE) Fc (N297A) H68 A2 (X0248)
gatattgtgatgatccaggatgaactctccaatcctgtcagttctggagaatcagtttccatctcctgtaggtctagtaagagtctcctagataaggaagggaagacatacttgaattggtttctgcagagaccaggacaatctcctcagctcctgatctatctgatgtccatgcgtgaatcaggagtctcagaccggtttagtggcagtgggtcaggaacagatttcaccctggaaatcagtagagtgaaggctgaggatgtgggtgtgtattactgtcaacaacttgtagagtatccgtggacgttcggtggaggcaccaagctggaaatcaaaggtggcggtggctctggcggaggtggatccggtggcggcggctctcagatccagttggtgcagtctggacctgagctgaagaagcctggagagacagtcaagatctcctgcaaggcttctggttataccttcacagacttttcaatgcactgggtgaggcaggctccaggaaagggtttaaagtggatgggctggataaacactgagactggtgagccaacatatgcagatgacttcaggggacggtttgccttctctttggaaacttctgccagcactgcctatttgcagatcaacaacctcaaaaatgaggacacggctacatatttttgtacctggtctgcttactggggccaagggactctggtcactgtctctgcctcgagcactgtggctgcaccatctgtcttcatcttcccgccatctgatgagcagttgaaatctggaactgcctctgttgtgtgcctgctgaattacttctatcccagagaggccaaagtacagtggaaggtggataacgccctccaatcgggtaactcccaggagagtgccacagagcaggacagcaaggacagcacctacagcctcagcagcgagctgacgctgagcaaagcagactacgagaaacacaaagtctacgcctgcgaagtcacccatcagggcctgagctcgcccgtcacaaagagcttcaacaggggagagcgtacggagcccaaatcttctgacaaaactcacacatgcccaccgtgcccatccggagcacctgaactcctgggtggaccgtcagtcttcctcttccccccaaaacccaaggacaccctcatgatctcccggacccctgaggtcacatgcgtggtggtggacgtgagccacgaagaccctgaggtcaagttcaactggtacgtggacggcgtggaggtgcataatgccaagacaaagccgcgggaggagcagtacgccagcacgtaccgtgtggtcagcgtcctcaccgtcctgcaccaggactggctgaatggcaaggagtacaagtgcaaggtctccaacaaagccctcccagcccccatcgagaaaaccatctccaaagccaaagggcagccccgagaaccacaggtgtacaccctgcccccatcccgggatgagctgaccaagaaccaggtcagcctgacctgcctggtcaaaggcttctatccaagcgacatcgccgtggagtgggagagcaatgggcagccggagaacaactacaagaccacgcctcccgtgctggactccgacggctccttcttcctctacagcaagctcaccgtggacaagagcaggtggcagcaggggaacgtcttctcatgctccgtgatgcatgaggctctgcacaaccactacacgcagaagagcctctccctgtctccgggtaactcattattcaaccaagaagttcaaattcccttgaccgaaagttacagcccgaattctgaagttcaattgttagagtctggtggcggtcttgttcagcctggtggttctttacgtctttcttgcgctgcttccggattcactttctctttttaccagatgcattgggttcgccaagctcctggtaaaggtttggagtgggtttctggtatctatccttctggtggctatactaagtatgctgactccgttaaaggtcgcttcactatctctagagacaactctaagaatactctctacttgcagatgaacagcttaagggctgaggacactgcagtctactattgtgcgagagatctagggtacggcagtagctggtactactttgactactggggccagggaaccctggtcaccgtctcaagcggtggcggcggttcggggggtggcggaagtggaggtggagggagtcagagcgctttgactcagcctgcctccgtgtctgggtctcctggacagtcgatcaccatctcctgcagtggaaccgacagtgacgttggtggttataaccatgtctcctggtaccaacaacacccaggcaaggcccccaaactcataatttatgatgtcgatcatcggccctcagggatctctaaccgtttctctggctccaagtctggcaacacggcctccctgaccatctctgggctccaggctgaggacgaggctgattattactgcagctcatatagaagcggtagcacttatgtcttcggaactgggaccaaggtcaccgtcctatga

SEQ ID NO: 18 - protein, 848 aa, Artificial Sequence
  Amino acid sequence of P2C2 CK(YAE) Fc (N297A) H68 A2 (X0248)
DIVMIQDELSNPVSSGESVSISCRSSKSLLDKEGKTYLNWFLQRPGQSPQLLIYLMSMRESGVSDRFSGSGSGTDFTLEISRVKAEDVGVYYCQQLVEYPWTFGGGTKLEIKGGGGSGGGGSGGGGSQIQLVQSGPELKKPGETVKISCKASGYTFTDFSMHWVRQAPGKGLKWMGWINTETGEPTYADDFRGRFAFSLETSASTAYLQINNLKNEDTATYFCTWSAYWGQGTLVTVSASSTVAAPSVFIFPPSDEQLKSGTASVVCLLNYFYPREAKVQWKVDNALQSGNSQESATEQDSKDSTYSLSSELTLSKADYEKHKVYACEVTHQGLSSPVTKSFNRGERTEPKSSDKTHTCPPCPSGAPELLGGPSVFLFPPKPKDTLMISRTPEVTCVVVDVSHEDPEVKFNWYVDGVEVHNAKTKPREEQYASTYRVVSVLTVLHQDWLNGKEYKCKVSNKALPAPIEKTISKAKGQPREPQVYTLPPSRDELTKNQVSLTCLVKGFYPSDIAVEWESNGQPENNYKTTPPVLDSDGSFFLYSKLTVDKSRWQQGNVFSCSVMHEALHNHYTQKSLSLSPGNSLFNQEVQIPLTESYSPNSEVQLLESGGGLVQPGGSLRLSCAASGFTFSFYQMHWVRQAPGKGLEWVSGIYPSGGYTKYADSVKGRFTISRDNSKNTLYLQMNSLRAEDTAVYYCARDLGYGSSWYYFDYWGQGTLVTVSSGGGGSGGGGSGGGGSQSALTQPASVSGSPGQSITISCSGTDSDVGGYNHVSWYQQHPGKAPKLIIYDVDHRPSGISNRFSGSKSGNTASLTISGLQAEDEADYYCSSYRSGSTYVFGTGTKVTVL

SEQ ID NO: 19 - DNA, 2427 bp, Artificial Sequence
  Nucleotide sequence of PDL2-CH1 Fc(N297A) H68 2E12 (X0249)
ttattcacagtgacagtccctaaggaactgtacataatagagcatggcagcaatgtgaccctggaatgcaactttgacactggaagtcatgtgaaccttggagcaataacagccagtttgcaaaaggtggaaaatgatacatccccacaccgtgaaagagccactttgctggaggagcagctgcccttagggaaggcctcgttccacatacctcaagtccaagtgagggacgaaggacagtaccaatgcataatcatctatggggtcgcctgggactacaagtacctgactctgaaagtcaaagcttcctacaggaaaataaacactcacatcctaaaggttccagaaacagatgaggtagagctcacctgccaggctacaggttatcctctggcagaagtatcctggccaaacgtcagcgttcctgccaacaccagccactccaggacccctgaaggcctctaccaggtcaccagtgttctgcgcctaaagccaccccctggcagaaacttcagctgtgtgttctggaatactcacgtgagggaacttactttggccagcattgaccttcaaagtcagatggaacccaggacccatccaacctcgagcgcctccaccaagggcccatcggtcttccccctggcaccctcctccaagagcacctctgggggcacagcggccctgggctgcctggtcaaggactacttccccgagccggtgacggtgtcgtggaactcaggcgccctgaccagcggcgtgcacaccttcccggctgtcctacagtcctcaggactctactccctcagcagcgtggtgaccgtgccctccagcagcttgggcacccagacctacatctgcaacgtgaatcacaagcccagcaacaccaaggtggacaagaaagttcgtacggagcccaaatcttctgacaaaactcacacatgcccaccgtgcccatccggagcacctgaactcctgggtggaccgtcagtcttcctcttccccccaaaacccaaggacaccctcatgatctcccggacccctgaggtcacatgcgtggtggtggacgtgagccacgaagaccctgaggtcaagttcaactggtacgtggacggcgtggaggtgcataatgccaagacaaagccgcgggaggagcagtacgccagcacgtaccgtgtggtcagcgtcctcaccgtcctgcaccaggactggctgaatggcaaggagtacaagtgcaaggtctccaacaaagccctcccagcccccatcgagaaaaccatctccaaagccaaagggcagccccgagaaccacaggtgtacaccctgcccccatcccgggatgagctgaccaagaaccaggtcagcctgacctgcctggtcaaaggcttctatccaagcgacatcgccgtggagtgggagagcaatgggcagccggagaacaactacaagaccacgcctcccgtgctggactccgacggctccttcttcctctacagcaagctcaccgtggacaagagcaggtggcagcaggggaacgtcttctcatgctccgtgatgcatgaggctctgcacaaccactacacgcagaagagcctctccctgtctccgggtaactcattattcaaccaagaagttcaaattcccttgaccgaaagttacagcccgaattctcaggtgcagctgaaggagtcaggacctggcagcgtggcgccctcacagagcctgtccatcacatgcaccgtctcagggttctcattaaccggctatggtgtaaactgggttcgccagcctccaggaaagggtctggagtggctgggaatgatatggggtgatggaagcacagactataattcagctctcaaatccagactatcgatcaccaaggacaactccaagagccaagttttcttaaaaatgaacagtctgcaaactgatgacacagccagatactactgtgctcgggatggttatagtaactttcattactatgttatggactactggggtcaaggaacctcagtcaccgtctcctctgggggtggaggctctggtggcggtggatccggcggaggtgggtcgggtggcggcggatctgacattgtgctcacccaatctccagcttctttggctgtgtctctaggtcagagagccaccatctcctgcagagccagtgaaagtgttgaatattatgtcacaagtttaatgcagtggtaccaacagaaaccaggacagccacccaaactcctcatctctgctgctagcaacgtagaatctggggtccctgccaggtttagtggcagtgggtctgggacagactttagcctcaacatccatcctgtggaggaggatgatattgcaatgtatttctgtcagcaaagtaggaaggttccatggacgttcggtggaggcaccaagctggaaatcaagtga

SEQ ID NO: 20 - protein, 808 aa, Artificial Sequence [sequence omitted]

SEQ ID NO: 21 - DNA, 2331 bp, Artificial Sequence
  Nucleotide sequence of monoIL10 Ck(YAE) Fc(N297A) H68 3D1 (X0281)
agcccaggccagggcacccagtctgagaacagctgcacccacttcccaggcaacctgcctaacatgcttcgagatctccgagatgccttcagcagagtgaagactttctttcaaatgaaggatcagctggacaacttgttgttaaaggagtccttgctggaggactttaagggttacctgggttgccaagccttgtctgagatgatccagttttacctggaggaggtgatgccccaagctgagaaccaagacccagacatcaaggcgcatgtgaactccctgggggagaacctgaagaccctcaggctgaggctacggcgctgtcatcgatttcttccctgtgaaaacggtggtggatccggcggtaagagcaaggccgtggagcaggtgaagaatgcctttaataagctccaagagaaaggcatctacaaagccatgagtgagtttgacatcttcatcaactacatagaagcctacattacaatgaagatacgaaactcgagcactgtggctgcaccatctgtcttcatcttcccgccatctgatgagcagttgaaatctggaactgcctctgttgtgtgcctgctgaattacttctatcccagagaggccaaagtacagtggaaggtggataacgccctccaatcgggtaactcccaggagagtgccacagagcaggacagcaaggacagcacctacagcctcagcagcgagctgacgctgagcaaagcagactacgagaaacacaaagtctacgcctgcgaagtcacccatcagggcctgagctcgcccgtcacaaagagcttcaacaggggagagcgtacggagcccaaatcttctgacaaaactcacacatgcccaccgtgcccatccggagcacctgaactcctgggtggaccgtcagtcttcctcttccccccaaaacccaaggacaccctcatgatctcccggacccctgaggtcacatgcgtggtggtggacgtgagccacgaagaccctgaggtcaagttcaactggtacgtggacggcgtggaggtgcataatgccaagacaaagccgcgggaggagcagtacgccagcacgtaccgtgtggtcagcgtcctcaccgtcctgcaccaggactggctgaatggcaaggagtacaagtgcaaggtctccaacaaagccctcccagcccccatcgagaaaaccatctccaaagccaaagggcagccccgagaaccacaggtgtacaccctgcccccatcccgggatgagctgaccaagaaccaggtcagcctgacctgcctggtcaaaggcttctatccaagcgacatcgccgtggagtgggagagcaatgggcagccggagaacaactacaagaccacgcctcccgtgctggactccgacggctccttcttcctctacagcaagctcaccgtggacaagagcaggtggcagcaggggaacgtcttctcatgctccgtgatgcatgaggctctgcacaaccactacacgcagaagagcctctccctgtctccgggtaactcattattcaaccaagaagttcaaattcccttgaccgaaagttacagcccgaattctcaggtccagctgcagcagtctgggcctgagctggtgaggcctggggaatcagtgaagatttcctgcaagggttccggctacacattcactgattatgctatacagtgggtgaagcagagtcatgcaaagagtctagagtggattggagttattaatatttactatgataatacaaactacaaccagaagtttaagggcaaggccacaatgactgtagacaaatcctccagcacagcctatatggaacttgccagattgacatctgaggattctgccatctattactgtgcaagagcggcctggtatatggactactggggtcaaggaacctcagtcaccgtctcctcagggggtggaggctctggtggcggtggctctggcggaggtggatccggtggcggcggatctgacattgtgctgtcacagtctccatcctccctggctgtgtcagcaggagagaaggtcactatgagctgcaaatccagtcagagtctgctcaacagtagaacccgagagaactacttggcttggtaccagcagaaaccagggcagtctcctaaactgctgatctactgggcatccactagggaatctggggtccctgatcgcttcacaggcagtggatctgggacagatttcactctcaccatcagcagtgtgcaggctgaagacctggcagtttattactgcacgcaatcttataatctttacacgttcggaggggggaccaagctggaaataaaataa

SEQ ID NO: 22 - protein, 776 aa, Artificial Sequence
  Amino acid sequence of monoIL10 Ck(YAE) Fc(N297A) H68 3D1 (X0281)
SPGQGTQSENSCTHFPGNLPNMLRDLRDAFSRVKTFFQMKDQLDNLLLKESLLEDFKGYLGCQALSEMIQFYLEEVMPQAENQDPDIKAHVNSLGENLKTLRLRLRRCHRFLPCENGGGSGGKSKAVEQVKNAFNKLQEKGIYKAMSEFDIFINYIEAYITMKIRNSSTVAAPSVFIFPPSDEQLKSGTASVVCLLNYFYPREAKVQWKVDNALQSGNSQESATEQDSKDSTYSLSSELTLSKADYEKHKVYACEVTHQGLSSPVTKSFNRGERTEPKSSDKTHTCPPCPSGAPELLGGPSVFLFPPKPKDTLMISRTPEVTCVVVDVSHEDPEVKFNWYVDGVEVHNAKTKPREEQYASTYRVVSVLTVLHQDWLNGKEYKCKVSNKALPAPIEKTISKAKGQPREPQVYTLPPSRDELTKNQVSLTCLVKGFYPSDIAVEWESNGQPENNYKTTPPVLDSDGSFFLYSKLTVDKSRWQQGNVFSCSVMHEALHNHYTQKSLSLSPGNSLFNQEVQIPLTESYSPNSQVQLQQSGPELVRPGESVKISCKGSGYTFTDYAIQWVKQSHAKSLEWIGVINIYYDNTNYNQKFKGKATMTVDKSSSTAYMELARLTSEDSAIYYCARAAWYMDYWGQGTSVTVSSGGGGSGGGGSGGGGSGGGGSDIVLSQSPSSLAVSAGEKVTMSCKSSQSLLNSRTRENYLAWYQQKPGQSPKLLIYWASTRESGVPDRFTGSGSGTDFTLTISSVQAEDLAVYYCTQSYNLYTFGGGTKLEIK

SEQ ID NO: 23 - DNA, 2330 bp, Artificial Sequence
  Nucleotide sequence of monoIl10CkwtFc(N297A)H68 3D1 (X0282)
agcccaggccagggcacccagtctgagaacagctgcacccacttcccaggcaacctgcctaacatgcttcgagatctccgagatgccttcagcagagtgaagactttctttcaaatgaaggatcagctggacaacttgttgttaaaggagtccttgctggaggactttaagggttacctgggttgccaagccttgtctgagatgatccagttttacctggaggaggtgatgccccaagctgagaaccaagacccagacatcaaggcgcatgtgaactccctgggggagaacctgaagaccctcaggctgaggctacggcgctgtcatcgatttcttccctgtgaaaacggtggtggatccggcggtaagagcaaggccgtggagcaggtgaagaatgcctttaataagctccaagagaaaggcatctacaaagccatgagtgagtttgacatcttcatcaactacatagaagcctacattacaatgaagatacgaaactcgagcactgtggctgcaccatctgtcttcatcttcccgccatctgatgagcagttgaaatctggaactgcctctgttgtgtgcctgctgaataacttctatcccagagaggccaaagtacagtggaaggtggataacgccctccaatcgggtaactcccaggagagtgtcacagagcaggacagcaaggacagcacctacagcctcagcagcaccctgacgctgagcaaagcagactacgagaaacacaaagtctacgcctgcgaagtcacccatcagggcctgagctcgcccgtcacaaagagcttcaacaggggagagcgtacggagcccaaatcttctgacaaaactcacacatgcccaccgtgcccatccggagcacctgaactcctgggtggaccgtcagtcttcctcttccccccaaaacccaaggacaccctcatgatctcccggacccctgaggtcacatgcgtggtggtggacgtgagccacgaagaccctgaggtcaagttcaactggtacgtggacggcgtggaggtgcataatgccaagacaaagccgcgggaggagcagtacgccagcacgtaccgtgtggtcagcgtcctcaccgtcctgcaccaggactggctgaatggcaaggagtacaagtgcaaggtctccaacaaagccctcccagcccccatcgagaaaaccatctccaaagccaaagggcagccccgagaaccacaggtgtacaccctgcccccatcccgggatgagctgaccaagaaccaggtcagcctgacctgcctggtcaaaggcttctatccaagcgacatcgccgtggagtgggagagcaatgggcagccggagaacaactacaagaccacgcctcccgtgctggactccgacggctccttcttcctctacagcaagctcaccgtggacaagagcaggtggcagcaggggaacgtcttctcatgctccgtgatgcatgaggctctgcacaaccactacacgcagaagagcctctccctgtctccgggtaactcattattcaaccaagaagttcaaattcccttgaccgaaagttacagcccgaattctcaggtccagctgcagcagtctgggcctgagctggtgaggcctggggaatcagtgaagatttcctgcaagggttccggctacacattcactgattatgctatacagtgggtgaagcagagtcatgcaaagagtctagagtggattggagttattaatatttactatgataatacaaactacaaccagaagtttaagggcaaggccacaatgactgtagacaaatcctccagcacagcctatatggaacttgccagattgacatctgaggattctgccatctattactgtgcaagagcggcctggtatatggactactggggtcaaggaacctcagtcaccgtctcctcagggggtggaggctctggtggcggtggctctggcggaggtggatccggtggcggcggatctgacattgtgctgtcacagtctccatcctccctggctgtgtcagcaggagagaaggtcactatgagctgcaaatccagtcagagtctgctcaacagtagaacccgagagaactacttggcttggtaccagcagaaaccagggcagtctcctaaactgctgatctactgggcatccactagggaatctggggtccctgatcgcttcacaggcagtggatctgggacagatttcactctcaccatcagcagtgtgcaggctgaagacctggcagtttattactgcacgcaatcttataatctttacacgttcggaggggggaccaagctggaaataaaata

SEQ ID NO: 24 - protein, 776 aa, Artificial Sequence [sequence omitted]

SEQ ID NO: 25 - DNA, 1806 bp, Artificial Sequence
  Nucleotide sequence for ORN116 comprising MET021 (anti-c-Met) scFv, human IgG1 SCC-P hinge, human IgG1 CH2, human IgG1 CH3 and human CH1
atggaagcaccagcgcagcttctcttcctcctgctactctggctcccagataccaccggtgacatccagatgacccagtctccatcctccctgtctgcatctgtaggagacagagtcaccatcacttgtcgggcaagtcagagcattaggaactatttaaattggtatcagcaggaaccagggaaagcccctaagctcctgatctatgctgcatccagtttgcaaagtggggtcccatcaaggttcagtggcagtggatctgggacagacttcattctcaccatcagcagtctgcagcctgaagattttgcaacttactactgtcaacagagttacgttaccccgctcactttcggcggagggaccaaggtggagatcaaagggggtggaggctctggtggcggtggctctggcggaggtggatccggtggcggcggctctgaagttcaattgttagagtctggtggcggtcttgttcagcctggtggttctttacgtctttcttgcgctgcttccggattcactttctctaagtacgatatgctttgggttcgccaagctcctggtaaaggtttggagtgggtttcttatatctatccttctggtggccttactgagtatgctgactccgttaaaggtcgcttcactatctctagagacaactctaagaatactctctacttgcagatgaacagcttaagggctgaggacacggccgtgtattactgtgcgagacgggctccccggtccctttcttttgatatctggggccaagggacaatggtcaccgtctcctcgagcgagcccaaatcttctgacaaaactcacacatgcccaccgtgcccatccggagcacctgaactcctgggtggaccgtcagtcttcctcttccccccaaaacccaaggacaccctcatgatctcccggacccctgaggtcacatgcgtggtggtggacgtgagccacgaagaccctgaggtcaagttcaactggtacgtggacggcgtggaggtgcataatgccaagacaaagccgcgggaggagcagtacaacagcacgtaccgtgtggtcagcgtcctcaccgtcctgcaccaggactggctgaatggcaaggagtacaagtgcaaggtctccaacaaagccctcccagcccccatcgagaaaaccatctccaaagccaaagggcagccccgagaaccacaggtgtacaccctgcccccatcccgggatgagctgaccaagaaccaggtcagcctgacctgcctggtcaaaggcttctatccaagcgacatcgccgtggagtgggagagcaatgggcagccggagaacaactacaagaccacgcctcccgtgctggactccgacggctccttcttcctctacagcaagctcaccgtggacaagagcaggtggcagcaggggaacgtcttctcatgctccgtgatgcatgaggctctgcacaaccactacacgcagaagagcctctccctgtctccgggtaaatctagagcctccaccaagggcccatcggtcttccccctggcaccctcctccaagagcacctctgggggcacagcggccctgggctgcctggtcaaggactacttccccgagccggtgacggtgtcgtggaactcaggcgccctgaccagcggcgtgcacaccttcccggctgtcctacagtcctcaggactctactccctcagcagcgtggtgaccgtgccctccagcagcttgggcacccagacctacatctgcaacgtgaatcacaagcccagcaacaccaaggtggacaagaaagtttga

SEQ ID NO: 26 - DNA, 1797 bp, Artificial Sequence
  Nucleotide sequence for ORN145 comprising : 4C04 (anti-RON) scFv, human IgG1 SCC-P hinge, human IgG1 CH2, human IgG1 CH3 and human CH1
atggaagcaccagcgcagcttctcttcctcctgctactctggctcccagataccaccggtgacattcagatgacccagtctcctgcctcccagtctgcatctctgggagaaagtgtcaccatcacatgcctggcaagtcagaccattggtacatggttagcatggtatcagcagaaaccagggaaatctcctcagctcctgatttatgctgcaaccagcttggcagatggggtcccatcaaggttcagtgctagtggatctggcacaaaattttctttcaagatcgacagcctacagtctgaagattttgtaagttattactgtcaacaactttacaatactccgtggacgttcggtggaggcaccaagctggaaatcaaaggtggcggtggctctggcggaggtggatccggtggcggcggctctcagatccagctgcagcagtctggacctgagctggtgaagcctgggacttcagtgaagatatcctgcaaggcttctgactacacactcactgacttctatatgaactgggtgaggcagaagcctggacagggacttgagtggattgggaggatttatcctggaaccgataaaactagatacaatgagaaattcagggacaaggccatactgaccgtggacacgtcctccagcacagcctacatgcagctcagcagcctgacatcagaggacactgctgtctatttctgtgcaagatccgcctactatggtaactacgttgctatggactactggggtcaaggaacctcagtcaccgtctcctcgagcgagcccaaatcttctgacaaaactcacacatgcccaccgtgcccatccggagcacctgaactcctgggtggaccgtcagtcttcctcttccccccaaaacccaaggacaccctcatgatctcccggacccctgaggtcacatgcgtggtggtggacgtgagccacgaagaccctgaggtcaagttcaactggtacgtggacggcgtggaggtgcataatgccaagacaaagccgcgggaggagcagtacaacagcacgtaccgtgtggtcagcgtcctcaccgtcctgcaccaggactggctgaatggcaaggagtacaagtgcaaggtctccaacaaagccctcccagcccccatcgagaaaaccatctccaaagccaaagggcagccccgagaaccacaggtgtacaccctgcccccatcccgggatgagctgaccaagaaccaggtcagcctgacctgcctggtcaaaggcttctatccaagcgacatcgccgtggagtgggagagcaatgggcagccggagaacaactacaagaccacgcctcccgtgctggactccgacggctccttcttcctctacagcaagctcaccgtggacaagagcaggtggcagcaggggaacgtcttctcatgctccgtgatgcatgaggctctgcacaaccactacacgcagaagagcctctccctgtctccgggtaaatctagagcctccaccaagggcccatcggtcttccccctggcaccctcctccaagagcacctctgggggcacagcggccctgggctgcctggtcaaggactacttccccgagccggtgacggtgtcgtggaactcaggcgccctgaccagcggcgtgcacaccttcccggctgtcctacagtcctcaggactctactccctcagcagcgtggtgaccgtgccctccagcagcttgggcacccagacctacatctgcaacgtgaatcacaagcccagcaacaccaaggtggacaagaaagtttga

SEQ ID NO: 27 - DNA, 1818 bp, Artificial Sequence
  Nucleotide sequence for ORN146 comprising : 4C04 (anti-RON) scFv, human IgG1 SCC-P hinge, human CH2, human CH3, and human Ck(YAE)
atggaagcaccagcgcagcttctcttcctcctgctactctggctcccagataccaccggtgacattcagatgacccagtctcctgcctcccagtctgcatctctgggagaaagtgtcaccatcacatgcctggcaagtcagaccattggtacatggttagcatggtatcagcagaaaccagggaaatctcctcagctcctgatttatgctgcaaccagcttggcagatggggtcccatcaaggttcagtgctagtggatctggcacaaaattttctttcaagatcgacagcctacagtctgaagattttgtaagttattactgtcaacaactttacaatactccgtggacgttcggtggaggcaccaagctggaaatcaaaggtggcggtggctctggcggaggtggatccggtggcggcggctctcagatccagctgcagcagtctggacctgagctggtgaagcctgggacttcagtgaagatatcctgcaaggcttctgactacacactcactgacttctatatgaactgggtgaggcagaagcctggacagggacttgagtggattgggaggatttatcctggaaccgataaaactagatacaatgagaaattcagggacaaggccatactgaccgtggacacgtcctccagcacagcctacatgcagctcagcagcctgacatcagaggacactgctgtctatttctgtgcaagatccgcctactatggtaactacgttgctatggactactggggtcaaggaacctcagtcaccgtctcctcgagcgagcccaaatcttctgacaaaactcacacatgcccaccgtgcccatccggagcacctgaactcctgggtggaccgtcagtcttcctcttccccccaaaacccaaggacaccctcatgatctcccggacccctgaggtcacatgcgtggtggtggacgtgagccacgaagaccctgaggtcaagttcaactggtacgtggacggcgtggaggtgcataatgccaagacaaagccgcgggaggagcagtacaacagcacgtaccgtgtggtcagcgtcctcaccgtcctgcaccaggactggctgaatggcaaggagtacaagtgcaaggtctccaacaaagccctcccagcccccatcgagaaaaccatctccaaagccaaagggcagccccgagaaccacaggtgtacaccctgcccccatcccgggatgagctgaccaagaaccaggtcagcctgacctgcctggtcaaaggcttctatccaagcgacatcgccgtggagtgggagagcaatgggcagccggagaacaactacaagaccacgcctcccgtgctggactccgacggctccttcttcctctacagcaagctcaccgtggacaagagcaggtggcagcaggggaacgtcttctcatgctccgtgatgcatgaggctctgcacaaccactacacgcagaagagcctctccctgtctccgggtaaatctagaactgtggctgcaccatctgtcttcatcttcccgccatctgatgagcagttgaaatctggaactgcctctgttgtgtgcctgctgaattacttctatcccagagaggccaaagtacagtggaaggtggataacgccctccaatcgggtaactcccaggagagtgccacagagcaggacagcaaggacagcacctacagcctcagcagcgagctgacgctgagcaaagcagactacgagaaacacaaagtctacgcctgcgaagtcacccatcagggcctgagctcgcccgtcacaaagagcttcaacaggggagagtga

SEQ ID NO: 28 - DNA, 1806 bp, Artificial Sequence
  Nucleotide sequence for ORN148 comprising : 11H09 (anti-RON) scFv, human IgG1 SCC-P hinge, human CH2, human CH3, and human Ck(YAE)
atggaagcaccagcgcagcttctcttcctcctgctactctggctcccagataccaccggtgacatccagatgacccagtctccatcctccttatctgcctctctgggagaaagagtcagtctcacttgtcgggcaagtcaggacattggtagtagcttaagctggcttcagcaggaaccagatggtactattaaacgcctgatctactccacatccagtttagattctggtgtccccaaaaggttcagtggcagtaggtcggggtcagattattctctcaccatcagcagccttgagtctgaagattttgtagactattactgtctacaatatgctagttctccgtggacgttcggtggaggcaccaagctggaaatcaaaggtggcggtggctctggcggaggtggatccggtggcggcggctctcaggtccagcttcagcagtctggggctgaactggcaaaacctggggcctcagtgaagatgtcctgcaagtcttctggctacacctttactagctactggatacactgggtaaaagagaggcctggacagggtctggaatggattggatacatttatcctaccactggttatactgagtccaatcagaagttcaaggacaaggccacattgactgcagacaaatcctccagcacagcctacatgcaactgagcagcctgacatctgaggactctgcagtctattactgtttcctactacggccctggtacttcgatgtctggggcgcagggaccacggtcaccgtctcctcgagcgagcccaaatcttctgacaaaactcacacatgcccaccgtgcccatccggagcacctgaactcctgggtggaccgtcagtcttcctcttccccccaaaacccaaggacaccctcatgatctcccggacccctgaggtcacatgcgtggtggtggacgtgagccacgaagaccctgaggtcaagttcaactggtacgtggacggcgtggaggtgcataatgccaagacaaagccgcgggaggagcagtacaacagcacgtaccgtgtggtcagcgtcctcaccgtcctgcaccaggactggctgaatggcaaggagtacaagtgcaaggtctccaacaaagccctcccagcccccatcgagaaaaccatctccaaagccaaagggcagccccgagaaccacaggtgtacaccctgcccccatcccgggatgagctgaccaagaaccaggtcagcctgacctgcctggtcaaaggcttctatccaagcgacatcgccgtggagtgggagagcaatgggcagccggagaacaactacaagaccacgcctcccgtgctggactccgacggctccttcttcctctacagcaagctcaccgtggacaagagcaggtggcagcaggggaacgtcttctcatgctccgtgatgcatgaggctctgcacaaccactacacgcagaagagcctctccctgtctccgggtaaatctagaactgtggctgcaccatctgtcttcatcttcccgccatctgatgagcagttgaaatctggaactgcctctgttgtgtgcctgctgaattacttctatcccagagaggccaaagtacagtggaaggtggataacgccctccaatcgggtaactcccaggagagtgccacagagcaggacagcaaggacagcacctacagcctcagcagcgagctgacgctgagcaaagcagactacgagaaacacaaagtctacgcctgcgaagtcacccatcagggcctgagctcgcccgtcacaaagagcttcaacaggggagagtga

SEQ ID NO: 29 - protein, 581 aa, Artificial Sequence
  ORN116 mature protein comprising MET021 (anti-c-Met) scFv, human IgG1 SCC-P hinge, human IgG1 CH2, human IgG1 CH3 and human CH1
DIQMTQSPSSLSASVGDRVTITCRASQSIRNYLNWYQQEPGKAPKLLIYAASSLQSGVPSRFSGSGSGTDFILTISSLQPEDFATYYCQQSYVTPLTFGGGTKVEIKGGGGSGGGGSGGGGSGGGGSEVQLLESGGGLVQPGGSLRLSCAASGFTFSKYDMLWVRQAPGKGLEWVSYIYPSGGLTEYADSVKGRFTISRDNSKNTLYLQMNSLRAEDTAVYYCARRAPRSLSFDIWGQGTMVTVSSSEPKSSDKTHTCPPCPSGAPELLGGPSVFLFPPKPKDTLMISRTPEVTCVVVDVSHEDPEVKFNWYVDGVEVHNAKTKPREEQYNSTYRVVSVLTVLHQDWLNGKEYKCKVSNKALPAPIEKTISKAKGQPREPQVYTLPPSRDELTKNQVSLTCLVKGFYPSDIAVEWESNGQPENNYKTTPPVLDSDGSFFLYSKLTVDKSRWQQGNVFSCSVMHEALHNHYTQKSLSLSPGKSRASTKGPSVFPLAPSSKSTSGGTAALGCLVKDYFPEPVTVSWNSGALTSGVHTFPAVLQSSGLYSLSSVVTVPSSSLGTQTYICNVNHKPSNTKVDKKV

SEQ ID NO: 30 - protein, 578 aa, Artificial Sequence
  ORN145 mature protein comprising : 4C04 (anti-RON) scFv, human IgG1 SCC-P hinge, human IgG1 CH2, human IgG1 CH3 and human CH1
DIQMTQSPASQSASLGESVTITCLASQTIGTWLAWYQQKPGKSPQLLIYAATSLADGVPSRFSASGSGTKFSFKIDSLQSEDFVSYYCQQLYNTPWTFGGGTKLEIKGGGGSGGGGSGGGGSQIQLQQSGPELVKPGTSVKISCKASDYTLTDFYMNWVRQKPGQGLEWIGRIYPGTDKTRYNEKFRDKAILTVDTSSSTAYMQLSSLTSEDTAVYFCARSAYYGNYVAMDYWGQGTSVTVSSSEPKSSDKTHTCPPCPSGAPELLGGPSVFLFPPKPKDTLMISRTPEVTCVVVDVSHEDPEVKFNWYVDGVEVHNAKTKPREEQYNSTYRVVSVLTVLHQDWLNGKEYKCKVSNKALPAPIEKTISKAKGQPREPQVYTLPPSRDELTKNQVSLTCLVKGFYPSDIAVEWESNGQPENNYKTTPPVLDSDGSFFLYSKLTVDKSRWQQGNVFSCSVMHEALHNHYTQKSLSLSPGKSRASTKGPSVFPLAPSSKSTSGGTAALGCLVKDYFPEPVTVSWNSGALTSGVHTFPAVLQSSGLYSLSSVVTVPSSSLGTQTYICNVNHKPSNTKVDKKV

SEQ ID NO: 31 - protein, 585 aa, Artificial Sequence
  ORN146 mature protein comprising : 4C04 (anti-RON) scFv, human IgG1 SCC-P hinge, human CH2, human CH3, and human Ck(YAE)
DIQMTQSPASQSASLGESVTITCLASQTIGTWLAWYQQKPGKSPQLLIYAATSLADGVPSRFSASGSGTKFSFKIDSLQSEDFVSYYCQQLYNTPWTFGGGTKLEIKGGGGSGGGGSGGGGSQIQLQQSGPELVKPGTSVKISCKASDYTLTDFYMNWVRQKPGQGLEWIGRIYPGTDKTRYNEKFRDKAILTVDTSSSTAYMQLSSLTSEDTAVYFCARSAYYGNYVAMDYWGQGTSVTVSSSEPKSSDKTHTCPPCPSGAPELLGGPSVFLFPPKPKDTLMISRTPEVTCVVVDVSHEDPEVKFNWYVDGVEVHNAKTKPREEQYNSTYRVVSVLTVLHQDWLNGKEYKCKVSNKALPAPIEKTISKAKGQPREPQVYTLPPSRDELTKNQVSLTCLVKGFYPSDIAVEWESNGQPENNYKTTPPVLDSDGSFFLYSKLTVDKSRWQQGNVFSCSVMHEALHNHYTQKSLSLSPGKSRTVAAPSVFIFPPSDEQLKSGTASVVCLLNYFYPREAKVQWKVDNALQSGNSQESATEQDSKDSTYSLSSELTLSKADYEKHKVYACEVTHQGLSSPVTKSFNRGE

SEQ ID NO: 32 - protein, 581 aa, Artificial Sequence
  ORN148 mature protein comprising : 11H09 (anti-RON) scFv, human IgG1 SCC-P hinge, human CH2, human CH3, and human Ck(YAE)
DIQMTQSPSSLSASLGERVSLTCRASQDIGSSLSWLQQEPDGTIKRLIYSTSSLDSGVPKRFSGSRSGSDYSLTISSLESEDFVDYYCLQYASSPWTFGGGTKLEIKGGGGSGGGGSGGGGSQVQLQQSGAELAKPGASVKMSCKSSGYTFTSYWIHWVKERPGQGLEWIGYIYPTTGYTESNQKFKDKATLTADKSSSTAYMQLSSLTSEDSAVYYCFLLRPWYFDVWGAGTTVTVSSSEPKSSDKTHTCPPCPSGAPELLGGPSVFLFPPKPKDTLMISRTPEVTCVVVDVSHEDPEVKFNWYVDGVEVHNAKTKPREEQYNSTYRVVSVLTVLHQDWLNGKEYKCKVSNKALPAPIEKTISKAKGQPREPQVYTLPPSRDELTKNQVSLTCLVKGFYPSDIAVEWESNGQPENNYKTTPPVLDSDGSFFLYSKLTVDKSRWQQGNVFSCSVMHEALHNHYTQKSLSLSPGKSRTVAAPSVFIFPPSDEQLKSGTASVVCLLNYFYPREAKVQWKVDNALQSGNSQESATEQDSKDSTYSLSSELTLSKADYEKHKVYACEVTHQGLSSPVTKSFNRGE

SEQ ID NO: 33 - DNA, 1809 bp, Artificial Sequence
  Nucleotide sequence for ORN160 comprising : 5D5 (anti-c-Met) scFv, human IgG1 SCC-P hinge, human IgG1 CH2, human IgG1 CH3, and human CH1
atggaagcaccagcgcagcttctcttcctcctgctactctggctcccagataccaccggtgactttatgatgtcacagtctccatcctccctaactgtgtcagttggagagaaggttactgtgagctgcaagtccagtcagtcccttttatatactagcagtcagaagaactacttggcctggtaccagcagaaaccaggtcagtctcctaaactgctgatttactgggcatccactagggaatctggggtccctgatcgcttcacaggcagtggatctgggacagatttcactctcaccatcaccagtgtgaaggctgacgacctggcagtttattactgtcagcaatattatgcctatccgtggacgttcggtggaggcaccaagttggagctcaaaggtggcggtggctctggcggaggtggatccggtggcggcggctctcaggtccaactgcagcagtctgggcctgagctggtgaggcctggggcttcagtgaagatgtcctgcagggcttcgggctataccttcaccagctactggttgcactgggttaaacagaggcctggacaaggccttgagtggattggcatgattgatccttccaatagtgacactaggtttaatccgaacttcaaggacaaggccacattgaatgtagacagatcttccaacacagcctacatgctgctcagcagcctgacatctgctgactctgcagtctattactgtgccacatatggtagctacgtttcccctctggactactggggtcaaggaacctcagtcaccgtctcctcgagcgagcccaaatcttctgacaaaactcacacatgcccaccgtgcccatccggagcacctgaactcctgggtggaccgtcagtcttcctcttccccccaaaacccaaggacaccctcatgatctcccggacccctgaggtcacatgcgtggtggtggacgtgagccacgaagaccctgaggtcaagttcaactggtacgtggacggcgtggaggtgcataatgccaagacaaagccgcgggaggagcagtacaacagcacgtaccgtgtggtcagcgtcctcaccgtcctgcaccaggactggctgaatggcaaggagtacaagtgcaaggtctccaacaaagccctcccagcccccatcgagaaaaccatctccaaagccaaagggcagccccgagaaccacaggtgtacaccctgcccccatcccgggatgagctgaccaagaaccaggtcagcctgacctgcctggtcaaaggcttctatccaagcgacatcgccgtggagtgggagagcaatgggcagccggagaacaactacaagaccacgcctcccgtgctggactccgacggctccttcttcctctacagcaagctcaccgtggacaagagcaggtggcagcaggggaacgtcttctcatgctccgtgatgcatgaggctctgcacaaccactacacgcagaagagcctctccctgtctccgggtaaatctagagcctccaccaagggcccatcggtcttccccctggcaccctcctccaagagcacctctgggggcacagcggccctgggctgcctggtcaaggactacttccccgagccggtgacggtgtcgtggaactcaggcgccctgaccagcggcgtgcacaccttcccggctgtcctacagtcctcaggactctactccctcagcagcgtggtgaccgtgccctccagcagcttgggcacccagacctacatctgcaacgtgaatcacaagcccagcaacaccaaggtggacaagaaagtttga

SEQ ID NO: 34 - DNA, 1821 bp, Artificial Sequence
  Nucleotide sequence for TSC001 comprising : HD37 (anti-CD39), human IgG1 SCC-P hinge, human IgG1 CH2, human IgG1 CH3 and human CH1
atggaagcaccagcgcagcttctcttcctcctgctactctggctcccagataccaccggtgacattgtgctgacccaatctccagcttctttggctgtgtctctagggcagagggccaccatctcctgcaaggccagccaaagtgttgattatgatggtgatagttatttgaactggtaccaacagattccaggacagccacccaaactcctcatctatgatgcatccaatctagtttctgggatcccacccaggtttagtggcagtgggtctgggacagacttcaccctcaacatccatcctgtggagaaggtggatgctgcaacctatcactgccagcaaagtactgaggatccgtggacgttcggtggaggcaccaagctggaaatcaaaggtggcggtggttcgggcggtggtgggtcgggtggcggcggagctagccaggttcagctgcagcagtctggggctgagctggtgaggcctgggtcctcagtgaagatttcctgcaaggcttctggctatgcattcagtagctactggatgaactgggtgaagcagaggcctggacagggtcttgagtggattggacagatttggcctggagatggtgatactaactacaatggaaagttcaagggtaaagccactctgactgcagacgaatcctccagcacagcctacatgcaactcagcagcctagcatctgaggactctgcggtctatttctgtgcaagacgggagactacgacggtaggccgttattactatgctatggactactggggtcaaggaacctcagtcaccgtctcctcgagcgagcccaaatcttctgacaaaactcacacatgcccaccgtgcccatccggagcacctgaactcctgggtggaccgtcagtcttcctcttccccccaaaacccaaggacaccctcatgatctcccggacccctgaggtcacatgcgtggtggtggacgtgagccacgaagaccctgaggtcaagttcaactggtacgtggacggcgtggaggtgcataatgccaagacaaagccgcgggaggagcagtacaacagcacgtaccgtgtggtcagcgtcctcaccgtcctgcaccaggactggctgaatggcaaggagtacaagtgcaaggtctccaacaaagccctcccagcccccatcgagaaaaccatctccaaagccaaagggcagccccgagaaccacaggtgtacaccctgcccccatcccgggatgagctgaccaagaaccaggtcagcctgacctgcctggtcaaaggcttctatccaagcgacatcgccgtggagtgggagagcaatgggcagccggagaacaactacaagaccacgcctcccgtgctggactccgacggctccttcttcctctacagcaagctcaccgtggacaagagcaggtggcagcaggggaacgtcttctcatgctccgtgatgcatgaggctctgcacaaccactacacgcagaagagcctctccctgtctccgggtaaatctagagcctccaccaagggcccatcggtcttccccctggcaccctcctccaagagcacctctgggggcacagcggccctgggctgcctggtcaaggactacttccccgagccggtgacggtgtcgtggaactcaggcgccctgaccagcggcgtgcacaccttcccggctgtcctacagtcctcaggactctactccctcagcagcgtggtgaccgtgccctccagcagcttgggcacccagacctacatctgcaacgtgaatcacaagcccagcaacaccaaggtggacaagaaagtttga

SEQ ID NO: 35 - DNA, 1800 bp, Artificial Sequence
  Nucleotide sequence for TSC002 comprising : 2H7 (anti-CD20) scFv, human IgG1 SCC-P hinge, human IgG1 CH2, human IgG1 CH3 and human CH1
atggaagcaccagcgcagcttctcttcctcctgctactctggctcccagataccaccggtcaaattgttctctcccagtctccagcaatcctgtctgcatctccaggggagaaggtcacaatgacttgcagggccagctcaagtgtaagttacatgcactggtaccagcagaagccaggatcctcccccaaaccctggatttatgccccatccaacctggcttctggagtccctgctcgcttcagtggcagtgggtctgggacctcttactctctcacaatcagcagagtggaggctgaagatgctgccacttattactgccagcagtggagttttaacccacccacgttcggtgctgggaccaagctggagctgaaagatggcggtggctcgggcggtggtggatctggaggaggtggggctagccaggcttatctacagcagtctggggctgagtcggtgaggcctggggcctcagtgaagatgtcctgcaaggcttctggctacacatttaccagttacaatatgcactgggtaaagcagacacctagacagggcctggaatggattggagctatttatccaggaaatggtgatacttcctacaatcagaagttcaagggcaaggccacactgactgtagacaaatcctccagcacagcctacatgcagctcagcagcctgacatctgaagactctgcggtctatttctgtgcaagagtggtgtactatagtaactcttactggtacttcgatgtctggggcacagggaccacggtcaccgtctcctcgagcgagcccaaatcttctgacaaaactcacacatgcccaccgtgcccatccggagcacctgaactcctgggtggaccgtcagtcttcctcttccccccaaaacccaaggacaccctcatgatctcccggacccctgaggtcacatgcgtggtggtggacgtgagccacgaagaccctgaggtcaagttcaactggtacgtggacggcgtggaggtgcataatgccaagacaaagccgcgggaggagcagtacaacagcacgtaccgtgtggtcagcgtcctcaccgtcctgcaccaggactggctgaatggcaaggagtacaagtgcaaggtctccaacaaagccctcccagcccccatcgagaaaaccatctccaaagccaaagggcagccccgagaaccacaggtgtacaccctgcccccatcccgggatgagctgaccaagaaccaggtcagcctgacctgcctggtcaaaggcttctatccaagcgacatcgccgtggagtgggagagcaatgggcagccggagaacaactacaagaccacgcctcccgtgctggactccgacggctccttcttcctctacagcaagctcaccgtggacaagagcaggtggcagcaggggaacgtcttctcatgctccgtgatgcatgaggctctgcacaaccactacacgcagaagagcctctccctgtctccgggtaaatctagagcctccaccaagggcccatcggtcttccccctggcaccctcctccaagagcacctctgggggcacagcggccctgggctgcctggtcaaggactacttccccgagccggtgacggtgtcgtggaactcaggcgccctgaccagcggcgtgcacaccttcccggctgtcctacagtcctcaggactctactccctcagcagcgtggtgaccgtgccctccagcagcttgggcacccagacctacatctgcaacgtgaatcacaagcccagcaacaccaaggtggacaagaaagtttga

SEQ ID NO: 36 - DNA, 1851 bp, Artificial Sequence
  Nucleotide sequence for TSC003 comprising : G19-4 (anti-CD3) scFv, altered human IgA1 hinge,  human IgG1 CH2, human IgG1 CH3, and human Ck(YAE)
atggaagcaccagcgcagcttctcttcctcctgctactctggctcccagataccaccggtgaggtccagctgcaacagtctggacctgaactggtgaagcctggagcttcaatgaagatttcctgcaaggcctctggttactcattcactggctacatcgtgaactggctgaagcagagccatggaaagaaccttgagtggattggacttattaatccatacaaaggtcttactacctacaaccagaaattcaagggcaaggccacattaactgtagacaagtcatccagcacagcctacatggagctcctcagtctgacatctgaagactctgcagtctattactgtgcaagatctgggtactatggtgactcggactggtacttcgatgtctggggcgcagggaccacggtcaccgtctcaagcggtggcggagggtctgggggtggcggatccggaggtggtggctctgcacaagacatccagatgacacagactacatcctccctgtctgcctctctgggagacagagtcaccatcagttgcagggcaagtcaggacattcgcaattatttaaactggtatcagcagaaaccagatggaactgttaaactcctgatctactacacatcaagattacactcaggagtcccatcaaggttcagtggcagtgggtctggaacagattattctctcaccattgccaacctgcaaccagaagatattgccacttacttttgccaacagggtaatacgcttccgtggacgttcggtggaggcaccaaactggtaaccaaacgctcgagcccctcaactccacctaccccatctccctcaactccacctaccccatctccctcatgcccaccgtgcccagcacctgaactcctgggtggaccgtcagtcttcctcttccccccaaaacccaaggacaccctcatgatctcccggacccctgaggtcacatgcgtggtggtggacgtgagccacgaagaccctgaggtcaagttcaactggtacgtggacggcgtggaggtgcataatgccaagacaaagccgcgggaggagcagtacaacagcacgtaccgtgtggtcagcgtcctcaccgtcctgcaccaggactggctgaatggcaaggagtacaagtgcaaggtctccaacaaagccctcccagcccccatcgagaaaaccatctccaaagccaaagggcagccccgagaaccacaggtgtacaccctgcccccatcccgggatgagctgaccaagaaccaggtcagcctgacctgcctggtcaaaggcttctatccaagcgacatcgccgtggagtgggagagcaatgggcagccggagaacaactacaagaccacgcctcccgtgctggactccgacggctccttcttcctctacagcaagctcaccgtggacaagagcaggtggcagcaggggaacgtcttctcatgctccgtgatgcatgaggctctgcacaaccactacacgcagaagagcctctccctgtctccgggtaaatctagaactgtggctgcaccatctgtcttcatcttcccgccatctgatgagcagttgaaatctggaactgcctctgttgtgtgcctgctgaattacttctatcccagagaggccaaagtacagtggaaggtggataacgccctccaatcgggtaactcccaggagagtgccacagagcaggacagcaaggacagcacctacagcctcagcagcgagctgacgctgagcaaagcagactacgagaaacacaaagtctacgcctgcgaagtcacccatcagggcctgagctcgcccgtcacaaagagcttcaacaggggagagtga

SEQ ID NO: 37 - DNA, 1812 bp, Artificial Sequence
  Nucleotide sequence for TSC004 comprising : G19-4 (anti-CD3) scFv, altered human IgA2 hinge, human IgG1 CH2, human IgG1 CH3, and human Ck(YAE)
atggaagcaccagcgcagcttctcttcctcctgctactctggctcccagataccaccggtgaggtccagctgcaacagtctggacctgaactggtgaagcctggagcttcaatgaagatttcctgcaaggcctctggttactcattcactggctacatcgtgaactggctgaagcagagccatggaaagaaccttgagtggattggacttattaatccatacaaaggtcttactacctacaaccagaaattcaagggcaaggccacattaactgtagacaagtcatccagcacagcctacatggagctcctcagtctgacatctgaagactctgcagtctattactgtgcaagatctgggtactatggtgactcggactggtacttcgatgtctggggcgcagggaccacggtcaccgtctcaagcggtggcggagggtctgggggtggcggatccggaggtggtggctctgcacaagacatccagatgacacagactacatcctccctgtctgcctctctgggagacagagtcaccatcagttgcagggcaagtcaggacattcgcaattatttaaactggtatcagcagaaaccagatggaactgttaaactcctgatctactacacatcaagattacactcaggagtcccatcaaggttcagtggcagtgggtctggaacagattattctctcaccattgccaacctgcaaccagaagatattgccacttacttttgccaacagggtaatacgcttccgtggacgttcggtggaggcaccaaactggtaaccaaacgctcgagccccccacctcccccatgcccaccgtgcccagcacctgaactcctgggtggaccgtcagtcttcctcttccccccaaaacccaaggacaccctcatgatctcccggacccctgaggtcacatgcgtggtggtggacgtgagccacgaagaccctgaggtcaagttcaactggtacgtggacggcgtggaggtgcataatgccaagacaaagccgcgggaggagcagtacaacagcacgtaccgtgtggtcagcgtcctcaccgtcctgcaccaggactggctgaatggcaaggagtacaagtgcaaggtctccaacaaagccctcccagcccccatcgagaaaaccatctccaaagccaaagggcagccccgagaaccacaggtgtacaccctgcccccatcccgggatgagctgaccaagaaccaggtcagcctgacctgcctggtcaaaggcttctatccaagcgacatcgccgtggagtgggagagcaatgggcagccggagaacaactacaagaccacgcctcccgtgctggactccgacggctccttcttcctctacagcaagctcaccgtggacaagagcaggtggcagcaggggaacgtcttctcatgctccgtgatgcatgaggctctgcacaaccactacacgcagaagagcctctccctgtctccgggtaaatctagaactgtggctgcaccatctgtcttcatcttcccgccatctgatgagcagttgaaatctggaactgcctctgttgtgtgcctgctgaattacttctatcccagagaggccaaagtacagtggaaggtggataacgccctccaatcgggtaactcccaggagagtgccacagagcaggacagcaaggacagcacctacagcctcagcagcgagctgacgctgagcaaagcagactacgagaaacacaaagtctacgcctgcgaagtcacccatcagggcctgagctcgcccgtcacaaagagcttcaacaggggagagtga

SEQ ID NO: 38 - DNA, 1842 bp, Artificial Sequence
  Nucleotide sequence for TSC005 comprising : G19-4 (anti-CD3) scFv, altered human IgG3 hinge, human IgG1 CH2, human IgG1 CH3, and human Ck(YAE)
atggaagcaccagcgcagcttctcttcctcctgctactctggctcccagataccaccggtgaggtccagctgcaacagtctggacctgaactggtgaagcctggagcttcaatgaagatttcctgcaaggcctctggttactcattcactggctacatcgtgaactggctgaagcagagccatggaaagaaccttgagtggattggacttattaatccatacaaaggtcttactacctacaaccagaaattcaagggcaaggccacattaactgtagacaagtcatccagcacagcctacatggagctcctcagtctgacatctgaagactctgcagtctattactgtgcaagatctgggtactatggtgactcggactggtacttcgatgtctggggcgcagggaccacggtcaccgtctcaagcggtggcggagggtctgggggtggcggatccggaggtggtggctctgcacaagacatccagatgacacagactacatcctccctgtctgcctctctgggagacagagtcaccatcagttgcagggcaagtcaggacattcgcaattatttaaactggtatcagcagaaaccagatggaactgttaaactcctgatctactacacatcaagattacactcaggagtcccatcaaggttcagtggcagtgggtctggaacagattattctctcaccattgccaacctgcaaccagaagatattgccacttacttttgccaacagggtaatacgcttccgtggacgttcggtggaggcaccaaactggtaaccaaacgctcgagcgagcccaaatctagcgacacacctcccccaagcccacggtccccatgcccaccgtgcccagcacctgaactcctgggtggaccgtcagtcttcctcttccccccaaaacccaaggacaccctcatgatctcccggacccctgaggtcacatgcgtggtggtggacgtgagccacgaagaccctgaggtcaagttcaactggtacgtggacggcgtggaggtgcataatgccaagacaaagccgcgggaggagcagtacaacagcacgtaccgtgtggtcagcgtcctcaccgtcctgcaccaggactggctgaatggcaaggagtacaagtgcaaggtctccaacaaagccctcccagcccccatcgagaaaaccatctccaaagccaaagggcagccccgagaaccacaggtgtacaccctgcccccatcccgggatgagctgaccaagaaccaggtcagcctgacctgcctggtcaaaggcttctatccaagcgacatcgccgtggagtgggagagcaatgggcagccggagaacaactacaagaccacgcctcccgtgctggactccgacggctccttcttcctctacagcaagctcaccgtggacaagagcaggtggcagcaggggaacgtcttctcatgctccgtgatgcatgaggctctgcacaaccactacacgcagaagagcctctccctgtctccgggtaaatctagaactgtggctgcaccatctgtcttcatcttcccgccatctgatgagcagttgaaatctggaactgcctctgttgtgtgcctgctgaattacttctatcccagagaggccaaagtacagtggaaggtggataacgccctccaatcgggtaactcccaggagagtgccacagagcaggacagcaaggacagcacctacagcctcagcagcgagctgacgctgagcaaagcagactacgagaaacacaaagtctacgcctgcgaagtcacccatcagggcctgagctcgcccgtcacaaagagcttcaacaggggagagtga

SEQ ID NO: 39 - DNA, 1899 bp, Artificial Sequence
  Nucleotide sequence for TSC006 comprising : G19-4 (anti-CD3) scFv, altered human IgD hinge, human IgG1 CH2, human IgG1 CH3, and human Ck(YAE)
atggaagcaccagcgcagcttctcttcctcctgctactctggctcccagataccaccggtgaggtccagctgcaacagtctggacctgaactggtgaagcctggagcttcaatgaagatttcctgcaaggcctctggttactcattcactggctacatcgtgaactggctgaagcagagccatggaaagaaccttgagtggattggacttattaatccatacaaaggtcttactacctacaaccagaaattcaagggcaaggccacattaactgtagacaagtcatccagcacagcctacatggagctcctcagtctgacatctgaagactctgcagtctattactgtgcaagatctgggtactatggtgactcggactggtacttcgatgtctggggcgcagggaccacggtcaccgtctcaagcggtggcggagggtctgggggtggcggatccggaggtggtggctctgcacaagacatccagatgacacagactacatcctccctgtctgcctctctgggagacagagtcaccatcagttgcagggcaagtcaggacattcgcaattatttaaactggtatcagcagaaaccagatggaactgttaaactcctgatctactacacatcaagattacactcaggagtcccatcaaggttcagtggcagtgggtctggaacagattattctctcaccattgccaacctgcaaccagaagatattgccacttacttttgccaacagggtaatacgcttccgtggacgttcggtggaggcaccaaactggtaaccaaacgctcgagcgagtctccaaaggcacaggcctcctccgtgcccactgcacaaccccaagcagagggcagcctcgccaaggcaaccacagccccagccaccacccgtaacacatgcccaccgtgcccagcacctgaactcctgggtggaccgtcagtcttcctcttccccccaaaacccaaggacaccctcatgatctcccggacccctgaggtcacatgcgtggtggtggacgtgagccacgaagaccctgaggtcaagttcaactggtacgtggacggcgtggaggtgcataatgccaagacaaagccgcgggaggagcagtacaacagcacgtaccgtgtggtcagcgtcctcaccgtcctgcaccaggactggctgaatggcaaggagtacaagtgcaaggtctccaacaaagccctcccagcccccatcgagaaaaccatctccaaagccaaagggcagccccgagaaccacaggtgtacaccctgcccccatcccgggatgagctgaccaagaaccaggtcagcctgacctgcctggtcaaaggcttctatccaagcgacatcgccgtggagtgggagagcaatgggcagccggagaacaactacaagaccacgcctcccgtgctggactccgacggctccttcttcctctacagcaagctcaccgtggacaagagcaggtggcagcaggggaacgtcttctcatgctccgtgatgcatgaggctctgcacaaccactacacgcagaagagcctctccctgtctccgggtaaatctagaactgtggctgcaccatctgtcttcatcttcccgccatctgatgagcagttgaaatctggaactgcctctgttgtgtgcctgctgaattacttctatcccagagaggccaaagtacagtggaaggtggataacgccctccaatcgggtaactcccaggagagtgccacagagcaggacagcaaggacagcacctacagcctcagcagcgagctgacgctgagcaaagcagactacgagaaacacaaagtctacgcctgcgaagtcacccatcagggcctgagctcgcccgtcacaaagagcttcaacaggggagagtga

SEQ ID NO: 40 - DNA, 1842 bp, Artificial Sequence
  Nucleotide sequence for TSC007 comprising : G19-4 (anti-CD3) scFv, altered human IgG1 hinge, human IgG1 CH2, human IgG1 CH3, and human Ck(YAE)
atggaagcaccagcgcagcttctcttcctcctgctactctggctcccagataccaccggtgaggtccagctgcaacagtctggacctgaactggtgaagcctggagcttcaatgaagatttcctgcaaggcctctggttactcattcactggctacatcgtgaactggctgaagcagagccatggaaagaaccttgagtggattggacttattaatccatacaaaggtcttactacctacaaccagaaattcaagggcaaggccacattaactgtagacaagtcatccagcacagcctacatggagctcctcagtctgacatctgaagactctgcagtctattactgtgcaagatctgggtactatggtgactcggactggtacttcgatgtctggggcgcagggaccacggtcaccgtctcaagcggtggcggagggtctgggggtggcggatccggaggtggtggctctgcacaagacatccagatgacacagactacatcctccctgtctgcctctctgggagacagagtcaccatcagttgcagggcaagtcaggacattcgcaattatttaaactggtatcagcagaaaccagatggaactgttaaactcctgatctactacacatcaagattacactcaggagtcccatcaaggttcagtggcagtgggtctggaacagattattctctcaccattgccaacctgcaaccagaagatattgccacttacttttgccaacagggtaatacgcttccgtggacgttcggtggaggcaccaaactggtaaccaaacgctcgagcgagcccaaatcttctgacaaaactcacacaagcccaccgagcccatgcccaccgtgcccagcacctgaactcctgggtggaccgtcagtcttcctcttccccccaaaacccaaggacaccctcatgatctcccggacccctgaggtcacatgcgtggtggtggacgtgagccacgaagaccctgaggtcaagttcaactggtacgtggacggcgtggaggtgcataatgccaagacaaagccgcgggaggagcagtacaacagcacgtaccgtgtggtcagcgtcctcaccgtcctgcaccaggactggctgaatggcaaggagtacaagtgcaaggtctccaacaaagccctcccagcccccatcgagaaaaccatctccaaagccaaagggcagccccgagaaccacaggtgtacaccctgcccccatcccgggatgagctgaccaagaaccaggtcagcctgacctgcctggtcaaaggcttctatccaagcgacatcgccgtggagtgggagagcaatgggcagccggagaacaactacaagaccacgcctcccgtgctggactccgacggctccttcttcctctacagcaagctcaccgtggacaagagcaggtggcagcaggggaacgtcttctcatgctccgtgatgcatgaggctctgcacaaccactacacgcagaagagcctctccctgtctccgggtaaatctagaactgtggctgcaccatctgtcttcatcttcccgccatctgatgagcagttgaaatctggaactgcctctgttgtgtgcctgctgaattacttctatcccagagaggccaaagtacagtggaaggtggataacgccctccaatcgggtaactcccaggagagtgccacagagcaggacagcaaggacagcacctacagcctcagcagcgagctgacgctgagcaaagcagactacgagaaacacaaagtctacgcctgcgaagtcacccatcagggcctgagctcgcccgtcacaaagagcttcaacaggggagagtga

SEQ ID NO: 41 - DNA, 2115 bp, Artificial Sequence
  Nucleotide sequence for TSC008 comprising : G19-4 (anti-CD3) scFv, altered human IgE CH2 hinge, human IgG1 CH2, human IgG1 CH3, and human Ck(YAE)
atggaagcaccagcgcagcttctcttcctcctgctactctggctcccagataccaccggtgaggtccagctgcaacagtctggacctgaactggtgaagcctggagcttcaatgaagatttcctgcaaggcctctggttactcattcactggctacatcgtgaactggctgaagcagagccatggaaagaaccttgagtggattggacttattaatccatacaaaggtcttactacctacaaccagaaattcaagggcaaggccacattaactgtagacaagtcatccagcacagcctacatggagctcctcagtctgacatctgaagactctgcagtctattactgtgcaagatctgggtactatggtgactcggactggtacttcgatgtctggggcgcagggaccacggtcaccgtctcaagcggtggcggagggtctgggggtggcggatccggaggtggtggctctgcacaagacatccagatgacacagactacatcctccctgtctgcctctctgggagacagagtcaccatcagttgcagggcaagtcaggacattcgcaattatttaaactggtatcagcagaaaccagatggaactgttaaactcctgatctactacacatcaagattacactcaggagtcccatcaaggttcagtggcagtgggtctggaacagattattctctcaccattgccaacctgcaaccagaagatattgccacttacttttgccaacagggtaatacgcttccgtggacgttcggtggaggcaccaaactggtaaccaaacgctcgagctccagggacttcaccccgcccaccgtgaagatcttacagtcgtccagcgacggcggcgggcacttccccccgaccatccagctcctgtgcctcgtctctgggtacaccccagggactatcaacatcacctggctggaggacgggcaggtcatggacgtggacttgtccaccgcctctaccacgcaggagggtgagctggcctccacacaaagcgagctcaccctcagccagaagcactggctgtcagaccgcacctacacctgccaggtcacctatcaaggtcacacctttgaggacagcaccaagaagtctgcatgcccaccgtgctccggagcacctgaactcctgggtggaccgtcagtcttcctcttccccccaaaacccaaggacaccctcatgatctcccggacccctgaggtcacatgcgtggtggtggacgtgagccacgaagaccctgaggtcaagttcaactggtacgtggacggcgtggaggtgcataatgccaagacaaagccgcgggaggagcagtacaacagcacgtaccgtgtggtcagcgtcctcaccgtcctgcaccaggactggctgaatggcaaggagtacaagtgcaaggtctccaacaaagccctcccagcccccatcgagaaaaccatctccaaagccaaagggcagccccgagaaccacaggtgtacaccctgcccccatcccgggatgagctgaccaagaaccaggtcagcctgacctgcctggtcaaaggcttctatccaagcgacatcgccgtggagtgggagagcaatgggcagccggagaacaactacaagaccacgcctcccgtgctggactccgacggctccttcttcctctacagcaagctcaccgtggacaagagcaggtggcagcaggggaacgtcttctcatgctccgtgatgcatgaggctctgcacaaccactacacgcagaagagcctctccctgtctccgggtaaatctagaactgtggctgcaccatctgtcttcatcttcccgccatctgatgagcagttgaaatctggaactgcctctgttgtgtgcctgctgaattacttctatcccagagaggccaaagtacagtggaaggtggataacgccctccaatcgggtaactcccaggagagtgccacagagcaggacagcaaggacagcacctacagcctcagcagcgagctgacgctgagcaaagcagactacgagaaacacaaagtctacgcctgcgaagtcacccatcagggcctgagctcgcccgtcacaaagagcttcaacaggggagagtga

SEQ ID NO: 42 - DNA, 2136 bp, Artificial Sequence
  Nucleotide sequence for TSC009 comprising : G19-4 (anti-CD3) scFv, altered human IgM CH2 hinge, human IgG1 CH2, human IgG1 CH3, and human Ck(YAE)
atggaagcaccagcgcagcttctcttcctcctgctactctggctcccagataccaccggtgaggtccagctgcaacagtctggacctgaactggtgaagcctggagcttcaatgaagatttcctgcaaggcctctggttactcattcactggctacatcgtgaactggctgaagcagagccatggaaagaaccttgagtggattggacttattaatccatacaaaggtcttactacctacaaccagaaattcaagggcaaggccacattaactgtagacaagtcatccagcacagcctacatggagctcctcagtctgacatctgaagactctgcagtctattactgtgcaagatctgggtactatggtgactcggactggtacttcgatgtctggggcgcagggaccacggtcaccgtctcaagcggtggcggagggtctgggggtggcggatccggaggtggtggctctgcacaagacatccagatgacacagactacatcctccctgtctgcctctctgggagacagagtcaccatcagttgcagggcaagtcaggacattcgcaattatttaaactggtatcagcagaaaccagatggaactgttaaactcctgatctactacacatcaagattacactcaggagtcccatcaaggttcagtggcagtgggtctggaacagattattctctcaccattgccaacctgcaaccagaagatattgccacttacttttgccaacagggtaatacgcttccgtggacgttcggtggaggcaccaaactggtaaccaaacgctcgagcattgccgagctgcctcccaaagtgagcgtcttcgtcccaccccgcgacggcttcttcggcaacccccgcaagtccaagctcatctgccaggccacgggtttcagtccccggcagattcaggtgtcctggctgcgcgaggggaagcaggtggggtctggcgtcaccacggaccaggtgcaggctgaggccaaagagtctgggcccacgacctacaaggtgaccagcacactgaccatcaaagagagcgactggctcagccagagcatgttcacctgccgcgtggatcacaggggcctgaccttccagcagaatgcgtcctccatgagtgtcccctgcccaccgtgcccatccggagcacctgaactcctgggtggaccgtcagtcttcctcttccccccaaaacccaaggacaccctcatgatctcccggacccctgaggtcacatgcgtggtggtggacgtgagccacgaagaccctgaggtcaagttcaactggtacgtggacggcgtggaggtgcataatgccaagacaaagccgcgggaggagcagtacaacagcacgtaccgtgtggtcagcgtcctcaccgtcctgcaccaggactggctgaatggcaaggagtacaagtgcaaggtctccaacaaagccctcccagcccccatcgagaaaaccatctccaaagccaaagggcagccccgagaaccacaggtgtacaccctgcccccatcccgggatgagctgaccaagaaccaggtcagcctgacctgcctggtcaaaggcttctatccaagcgacatcgccgtggagtgggagagcaatgggcagccggagaacaactacaagaccacgcctcccgtgctggactccgacggctccttcttcctctacagcaagctcaccgtggacaagagcaggtggcagcaggggaacgtcttctcatgctccgtgatgcatgaggctctgcacaaccactacacgcagaagagcctctccctgtctccgggtaaatctagaactgtggctgcaccatctgtcttcatcttcccgccatctgatgagcagttgaaatctggaactgcctctgttgtgtgcctgctgaattacttctatcccagagaggccaaagtacagtggaaggtggataacgccctccaatcgggtaactcccaggagagtgccacagagcaggacagcaaggacagcacctacagcctcagcagcgagctgacgctgagcaaagcagactacgagaaacacaaagtctacgcctgcgaagtcacccatcagggcctgagctcgcccgtcacaaagagcttcaacaggggagagtga

SEQ ID NO: 43 - DNA, 1839 bp, Artificial Sequence
  Nucleotide sequence for TSC010 comprising : HD37 (anti-CD19) scFv, altered human IgA1 hinge, human IgG1 CH2, human IgG1 CH3, and human CH1
atggaagcaccagcgcagcttctcttcctcctgctactctggctcccagataccaccggtgacattgtgctgacccaatctccagcttctttggctgtgtctctagggcagagggccaccatctcctgcaaggccagccaaagtgttgattatgatggtgatagttatttgaactggtaccaacagattccaggacagccacccaaactcctcatctatgatgcatccaatctagtttctgggatcccacccaggtttagtggcagtgggtctgggacagacttcaccctcaacatccatcctgtggagaaggtggatgctgcaacctatcactgccagcaaagtactgaggatccgtggacgttcggtggaggcaccaagctggaaatcaaaggtggcggtggttcgggcggtggtgggtcgggtggcggcggagctagccaggttcagctgcagcagtctggggctgagctggtgaggcctgggtcctcagtgaagatttcctgcaaggcttctggctatgcattcagtagctactggatgaactgggtgaagcagaggcctggacagggtcttgagtggattggacagatttggcctggagatggtgatactaactacaatggaaagttcaagggtaaagccactctgactgcagacgaatcctccagcacagcctacatgcaactcagcagcctagcatctgaggactctgcggtctatttctgtgcaagacgggagactacgacggtaggccgttattactatgctatggactactggggtcaaggaacctcagtcaccgtctcctcgagcccctcaactccacctaccccatctccctcaactccacctaccccatctccctcatgcccaccgtgcccagcacctgaactcctgggtggaccgtcagtcttcctcttccccccaaaacccaaggacaccctcatgatctcccggacccctgaggtcacatgcgtggtggtggacgtgagccacgaagaccctgaggtcaagttcaactggtacgtggacggcgtggaggtgcataatgccaagacaaagccgcgggaggagcagtacaacagcacgtaccgtgtggtcagcgtcctcaccgtcctgcaccaggactggctgaatggcaaggagtacaagtgcaaggtctccaacaaagccctcccagcccccatcgagaaaaccatctccaaagccaaagggcagccccgagaaccacaggtgtacaccctgcccccatcccgggatgagctgaccaagaaccaggtcagcctgacctgcctggtcaaaggcttctatccaagcgacatcgccgtggagtgggagagcaatgggcagccggagaacaactacaagaccacgcctcccgtgctggactccgacggctccttcttcctctacagcaagctcaccgtggacaagagcaggtggcagcaggggaacgtcttctcatgctccgtgatgcatgaggctctgcacaaccactacacgcagaagagcctctccctgtctccgggtaaatctagagcctccaccaagggcccatcggtcttccccctggcaccctcctccaagagcacctctgggggcacagcggccctgggctgcctggtcaaggactacttccccgagccggtgacggtgtcgtggaactcaggcgccctgaccagcggcgtgcacaccttcccggctgtcctacagtcctcaggactctactccctcagcagcgtggtgaccgtgccctccagcagcttgggcacccagacctacatctgcaacgtgaatcacaagcccagcaacaccaaggtggacaagaaagtttga

SEQ ID NO: 44 - DNA, 1800 bp, Artificial Sequence
  Nucleotide sequence for TSC011 comprising : HD37 (anti-CD19) scFv, altered human IgA2 hinge, human IgG1 CH2, human IgG1 CH3, and human CH1
atggaagcaccagcgcagcttctcttcctcctgctactctggctcccagataccaccggtgacattgtgctgacccaatctccagcttctttggctgtgtctctagggcagagggccaccatctcctgcaaggccagccaaagtgttgattatgatggtgatagttatttgaactggtaccaacagattccaggacagccacccaaactcctcatctatgatgcatccaatctagtttctgggatcccacccaggtttagtggcagtgggtctgggacagacttcaccctcaacatccatcctgtggagaaggtggatgctgcaacctatcactgccagcaaagtactgaggatccgtggacgttcggtggaggcaccaagctggaaatcaaaggtggcggtggttcgggcggtggtgggtcgggtggcggcggagctagccaggttcagctgcagcagtctggggctgagctggtgaggcctgggtcctcagtgaagatttcctgcaaggcttctggctatgcattcagtagctactggatgaactgggtgaagcagaggcctggacagggtcttgagtggattggacagatttggcctggagatggtgatactaactacaatggaaagttcaagggtaaagccactctgactgcagacgaatcctccagcacagcctacatgcaactcagcagcctagcatctgaggactctgcggtctatttctgtgcaagacgggagactacgacggtaggccgttattactatgctatggactactggggtcaaggaacctcagtcaccgtctcctcgagccccccacctcccccatgcccaccgtgcccagcacctgaactcctgggtggaccgtcagtcttcctcttccccccaaaacccaaggacaccctcatgatctcccggacccctgaggtcacatgcgtggtggtggacgtgagccacgaagaccctgaggtcaagttcaactggtacgtggacggcgtggaggtgcataatgccaagacaaagccgcgggaggagcagtacaacagcacgtaccgtgtggtcagcgtcctcaccgtcctgcaccaggactggctgaatggcaaggagtacaagtgcaaggtctccaacaaagccctcccagcccccatcgagaaaaccatctccaaagccaaagggcagccccgagaaccacaggtgtacaccctgcccccatcccgggatgagctgaccaagaaccaggtcagcctgacctgcctggtcaaaggcttctatccaagcgacatcgccgtggagtgggagagcaatgggcagccggagaacaactacaagaccacgcctcccgtgctggactccgacggctccttcttcctctacagcaagctcaccgtggacaagagcaggtggcagcaggggaacgtcttctcatgctccgtgatgcatgaggctctgcacaaccactacacgcagaagagcctctccctgtctccgggtaaatctagagcctccaccaagggcccatcggtcttccccctggcaccctcctccaagagcacctctgggggcacagcggccctgggctgcctggtcaaggactacttccccgagccggtgacggtgtcgtggaactcaggcgccctgaccagcggcgtgcacaccttcccggctgtcctacagtcctcaggactctactccctcagcagcgtggtgaccgtgccctccagcagcttgggcacccagacctacatctgcaacgtgaatcacaagcccagcaacaccaaggtggacaagaaagtttga

SEQ ID NO: 45 - DNA, 1830 bp, Artificial Sequence
  Nucleotide sequence for TSC012 comprising : HD37 (anti-CD19) scFv, altered human IgG1 hinge,  human IgG1 CH2, human IgG1 CH3, and human CH1
atggaagcaccagcgcagcttctcttcctcctgctactctggctcccagataccaccggtgacattgtgctgacccaatctccagcttctttggctgtgtctctagggcagagggccaccatctcctgcaaggccagccaaagtgttgattatgatggtgatagttatttgaactggtaccaacagattccaggacagccacccaaactcctcatctatgatgcatccaatctagtttctgggatcccacccaggtttagtggcagtgggtctgggacagacttcaccctcaacatccatcctgtggagaaggtggatgctgcaacctatcactgccagcaaagtactgaggatccgtggacgttcggtggaggcaccaagctggaaatcaaaggtggcggtggttcgggcggtggtgggtcgggtggcggcggagctagccaggttcagctgcagcagtctggggctgagctggtgaggcctgggtcctcagtgaagatttcctgcaaggcttctggctatgcattcagtagctactggatgaactgggtgaagcagaggcctggacagggtcttgagtggattggacagatttggcctggagatggtgatactaactacaatggaaagttcaagggtaaagccactctgactgcagacgaatcctccagcacagcctacatgcaactcagcagcctagcatctgaggactctgcggtctatttctgtgcaagacgggagactacgacggtaggccgttattactatgctatggactactggggtcaaggaacctcagtcaccgtctcctcgagcgagcccaaatcttctgacaaaactcacacaagcccaccgagcccatgcccaccgtgcccagcacctgaactcctgggtggaccgtcagtcttcctcttccccccaaaacccaaggacaccctcatgatctcccggacccctgaggtcacatgcgtggtggtggacgtgagccacgaagaccctgaggtcaagttcaactggtacgtggacggcgtggaggtgcataatgccaagacaaagccgcgggaggagcagtacaacagcacgtaccgtgtggtcagcgtcctcaccgtcctgcaccaggactggctgaatggcaaggagtacaagtgcaaggtctccaacaaagccctcccagcccccatcgagaaaaccatctccaaagccaaagggcagccccgagaaccacaggtgtacaccctgcccccatcccgggatgagctgaccaagaaccaggtcagcctgacctgcctggtcaaaggcttctatccaagcgacatcgccgtggagtgggagagcaatgggcagccggagaacaactacaagaccacgcctcccgtgctggactccgacggctccttcttcctctacagcaagctcaccgtggacaagagcaggtggcagcaggggaacgtcttctcatgctccgtgatgcatgaggctctgcacaaccactacacgcagaagagcctctccctgtctccgggtaaatctagagcctccaccaagggcccatcggtcttccccctggcaccctcctccaagagcacctctgggggcacagcggccctgggctgcctggtcaaggactacttccccgagccggtgacggtgtcgtggaactcaggcgccctgaccagcggcgtgcacaccttcccggctgtcctacagtcctcaggactctactccctcagcagcgtggtgaccgtgccctccagcagcttgggcacccagacctacatctgcaacgtgaatcacaagcccagcaacaccaaggtggacaagaaagtttga

SEQ ID NO: 46 - DNA, 1830 bp, Artificial Sequence
  Nucleotide sequence for TSC013 comprising : HD37 (anti-CD19) scFv, altered human IgG3 hinge, human IgG1 CH2, human IgG1 CH3, and human CH1
atggaagcaccagcgcagcttctcttcctcctgctactctggctcccagataccaccggtgacattgtgctgacccaatctccagcttctttggctgtgtctctagggcagagggccaccatctcctgcaaggccagccaaagtgttgattatgatggtgatagttatttgaactggtaccaacagattccaggacagccacccaaactcctcatctatgatgcatccaatctagtttctgggatcccacccaggtttagtggcagtgggtctgggacagacttcaccctcaacatccatcctgtggagaaggtggatgctgcaacctatcactgccagcaaagtactgaggatccgtggacgttcggtggaggcaccaagctggaaatcaaaggtggcggtggttcgggcggtggtgggtcgggtggcggcggagctagccaggttcagctgcagcagtctggggctgagctggtgaggcctgggtcctcagtgaagatttcctgcaaggcttctggctatgcattcagtagctactggatgaactgggtgaagcagaggcctggacagggtcttgagtggattggacagatttggcctggagatggtgatactaactacaatggaaagttcaagggtaaagccactctgactgcagacgaatcctccagcacagcctacatgcaactcagcagcctagcatctgaggactctgcggtctatttctgtgcaagacgggagactacgacggtaggccgttattactatgctatggactactggggtcaaggaacctcagtcaccgtctcctcgagcgagcccaaatctagcgacacacctcccccaagcccacggtccccatgcccaccgtgcccagcacctgaactcctgggtggaccgtcagtcttcctcttccccccaaaacccaaggacaccctcatgatctcccggacccctgaggtcacatgcgtggtggtggacgtgagccacgaagaccctgaggtcaagttcaactggtacgtggacggcgtggaggtgcataatgccaagacaaagccgcgggaggagcagtacaacagcacgtaccgtgtggtcagcgtcctcaccgtcctgcaccaggactggctgaatggcaaggagtacaagtgcaaggtctccaacaaagccctcccagcccccatcgagaaaaccatctccaaagccaaagggcagccccgagaaccacaggtgtacaccctgcccccatcccgggatgagctgaccaagaaccaggtcagcctgacctgcctggtcaaaggcttctatccaagcgacatcgccgtggagtgggagagcaatgggcagccggagaacaactacaagaccacgcctcccgtgctggactccgacggctccttcttcctctacagcaagctcaccgtggacaagagcaggtggcagcaggggaacgtcttctcatgctccgtgatgcatgaggctctgcacaaccactacacgcagaagagcctctccctgtctccgggtaaatctagagcctccaccaagggcccatcggtcttccccctggcaccctcctccaagagcacctctgggggcacagcggccctgggctgcctggtcaaggactacttccccgagccggtgacggtgtcgtggaactcaggcgccctgaccagcggcgtgcacaccttcccggctgtcctacagtcctcaggactctactccctcagcagcgtggtgaccgtgccctccagcagcttgggcacccagacctacatctgcaacgtgaatcacaagcccagcaacaccaaggtggacaagaaagtttga

SEQ ID NO: 47 - DNA, 1887 bp, Artificial Sequence
  Nucleotide sequence for TSC014 comprising : HD37 (anti-CD19) scFv, altered human IgD hinge, human IgG1 CH2, human IgG1 CH3, and human CH1
atggaagcaccagcgcagcttctcttcctcctgctactctggctcccagataccaccggtgacattgtgctgacccaatctccagcttctttggctgtgtctctagggcagagggccaccatctcctgcaaggccagccaaagtgttgattatgatggtgatagttatttgaactggtaccaacagattccaggacagccacccaaactcctcatctatgatgcatccaatctagtttctgggatcccacccaggtttagtggcagtgggtctgggacagacttcaccctcaacatccatcctgtggagaaggtggatgctgcaacctatcactgccagcaaagtactgaggatccgtggacgttcggtggaggcaccaagctggaaatcaaaggtggcggtggttcgggcggtggtgggtcgggtggcggcggagctagccaggttcagctgcagcagtctggggctgagctggtgaggcctgggtcctcagtgaagatttcctgcaaggcttctggctatgcattcagtagctactggatgaactgggtgaagcagaggcctggacagggtcttgagtggattggacagatttggcctggagatggtgatactaactacaatggaaagttcaagggtaaagccactctgactgcagacgaatcctccagcacagcctacatgcaactcagcagcctagcatctgaggactctgcggtctatttctgtgcaagacgggagactacgacggtaggccgttattactatgctatggactactggggtcaaggaacctcagtcaccgtctcctcgagcgagtctccaaaggcacaggcctcctccgtgcccactgcacaaccccaagcagagggcagcctcgccaaggcaaccacagccccagccaccacccgtaacacatgcccaccgtgcccagcacctgaactcctgggtggaccgtcagtcttcctcttccccccaaaacccaaggacaccctcatgatctcccggacccctgaggtcacatgcgtggtggtggacgtgagccacgaagaccctgaggtcaagttcaactggtacgtggacggcgtggaggtgcataatgccaagacaaagccgcgggaggagcagtacaacagcacgtaccgtgtggtcagcgtcctcaccgtcctgcaccaggactggctgaatggcaaggagtacaagtgcaaggtctccaacaaagccctcccagcccccatcgagaaaaccatctccaaagccaaagggcagccccgagaaccacaggtgtacaccctgcccccatcccgggatgagctgaccaagaaccaggtcagcctgacctgcctggtcaaaggcttctatccaagcgacatcgccgtggagtgggagagcaatgggcagccggagaacaactacaagaccacgcctcccgtgctggactccgacggctccttcttcctctacagcaagctcaccgtggacaagagcaggtggcagcaggggaacgtcttctcatgctccgtgatgcatgaggctctgcacaaccactacacgcagaagagcctctccctgtctccgggtaaatctagagcctccaccaagggcccatcggtcttccccctggcaccctcctccaagagcacctctgggggcacagcggccctgggctgcctggtcaaggactacttccccgagccggtgacggtgtcgtggaactcaggcgccctgaccagcggcgtgcacaccttcccggctgtcctacagtcctcaggactctactccctcagcagcgtggtgaccgtgccctccagcagcttgggcacccagacctacatctgcaacgtgaatcacaagcccagcaacaccaaggtggacaagaaagtttga

SEQ ID NO: 48 - DNA, 2103 bp, Artificial Sequence
  Nucleotide sequence for TSC015 comprising : HD37 (anti-CD19) scFv, altered human IgE CH2 hinge, human IgG1 CH2, human IgG1 CH3, and human CH1
atggaagcaccagcgcagcttctcttcctcctgctactctggctcccagataccaccggtgacattgtgctgacccaatctccagcttctttggctgtgtctctagggcagagggccaccatctcctgcaaggccagccaaagtgttgattatgatggtgatagttatttgaactggtaccaacagattccaggacagccacccaaactcctcatctatgatgcatccaatctagtttctgggatcccacccaggtttagtggcagtgggtctgggacagacttcaccctcaacatccatcctgtggagaaggtggatgctgcaacctatcactgccagcaaagtactgaggatccgtggacgttcggtggaggcaccaagctggaaatcaaaggtggcggtggttcgggcggtggtgggtcgggtggcggcggagctagccaggttcagctgcagcagtctggggctgagctggtgaggcctgggtcctcagtgaagatttcctgcaaggcttctggctatgcattcagtagctactggatgaactgggtgaagcagaggcctggacagggtcttgagtggattggacagatttggcctggagatggtgatactaactacaatggaaagttcaagggtaaagccactctgactgcagacgaatcctccagcacagcctacatgcaactcagcagcctagcatctgaggactctgcggtctatttctgtgcaagacgggagactacgacggtaggccgttattactatgctatggactactggggtcaaggaacctcagtcaccgtctcctcgagctccagggacttcaccccgcccaccgtgaagatcttacagtcgtccagcgacggcggcgggcacttccccccgaccatccagctcctgtgcctcgtctctgggtacaccccagggactatcaacatcacctggctggaggacgggcaggtcatggacgtggacttgtccaccgcctctaccacgcaggagggtgagctggcctccacacaaagcgagctcaccctcagccagaagcactggctgtcagaccgcacctacacctgccaggtcacctatcaaggtcacacctttgaggacagcaccaagaagtctgcatgcccaccgtgctccggagcacctgaactcctgggtggaccgtcagtcttcctcttccccccaaaacccaaggacaccctcatgatctcccggacccctgaggtcacatgcgtggtggtggacgtgagccacgaagaccctgaggtcaagttcaactggtacgtggacggcgtggaggtgcataatgccaagacaaagccgcgggaggagcagtacaacagcacgtaccgtgtggtcagcgtcctcaccgtcctgcaccaggactggctgaatggcaaggagtacaagtgcaaggtctccaacaaagccctcccagcccccatcgagaaaaccatctccaaagccaaagggcagccccgagaaccacaggtgtacaccctgcccccatcccgggatgagctgaccaagaaccaggtcagcctgacctgcctggtcaaaggcttctatccaagcgacatcgccgtggagtgggagagcaatgggcagccggagaacaactacaagaccacgcctcccgtgctggactccgacggctccttcttcctctacagcaagctcaccgtggacaagagcaggtggcagcaggggaacgtcttctcatgctccgtgatgcatgaggctctgcacaaccactacacgcagaagagcctctccctgtctccgggtaaatctagagcctccaccaagggcccatcggtcttccccctggcaccctcctccaagagcacctctgggggcacagcggccctgggctgcctggtcaaggactacttccccgagccggtgacggtgtcgtggaactcaggcgccctgaccagcggcgtgcacaccttcccggctgtcctacagtcctcaggactctactccctcagcagcgtggtgaccgtgccctccagcagcttgggcacccagacctacatctgcaacgtgaatcacaagcccagcaacaccaaggtggacaagaaagtttga

SEQ ID NO: 49 - DNA, 2124 bp, Artificial Sequence
  Nucleotide sequence for TSC016 comprising : HD37 (anti-CD19) scFv, altered human IgM CH2 hinge, human IgG1 CH2, human IgG1 CH3, and human CH1
atggaagcaccagcgcagcttctcttcctcctgctactctggctcccagataccaccggtgacattgtgctgacccaatctccagcttctttggctgtgtctctagggcagagggccaccatctcctgcaaggccagccaaagtgttgattatgatggtgatagttatttgaactggtaccaacagattccaggacagccacccaaactcctcatctatgatgcatccaatctagtttctgggatcccacccaggtttagtggcagtgggtctgggacagacttcaccctcaacatccatcctgtggagaaggtggatgctgcaacctatcactgccagcaaagtactgaggatccgtggacgttcggtggaggcaccaagctggaaatcaaaggtggcggtggttcgggcggtggtgggtcgggtggcggcggagctagccaggttcagctgcagcagtctggggctgagctggtgaggcctgggtcctcagtgaagatttcctgcaaggcttctggctatgcattcagtagctactggatgaactgggtgaagcagaggcctggacagggtcttgagtggattggacagatttggcctggagatggtgatactaactacaatggaaagttcaagggtaaagccactctgactgcagacgaatcctccagcacagcctacatgcaactcagcagcctagcatctgaggactctgcggtctatttctgtgcaagacgggagactacgacggtaggccgttattactatgctatggactactggggtcaaggaacctcagtcaccgtctcctcgagcattgccgagctgcctcccaaagtgagcgtcttcgtcccaccccgcgacggcttcttcggcaacccccgcaagtccaagctcatctgccaggccacgggtttcagtccccggcagattcaggtgtcctggctgcgcgaggggaagcaggtggggtctggcgtcaccacggaccaggtgcaggctgaggccaaagagtctgggcccacgacctacaaggtgaccagcacactgaccatcaaagagagcgactggctcagccagagcatgttcacctgccgcgtggatcacaggggcctgaccttccagcagaatgcgtcctccatgagtgtcccctgcccaccgtgcccatccggagcacctgaactcctgggtggaccgtcagtcttcctcttccccccaaaacccaaggacaccctcatgatctcccggacccctgaggtcacatgcgtggtggtggacgtgagccacgaagaccctgaggtcaagttcaactggtacgtggacggcgtggaggtgcataatgccaagacaaagccgcgggaggagcagtacaacagcacgtaccgtgtggtcagcgtcctcaccgtcctgcaccaggactggctgaatggcaaggagtacaagtgcaaggtctccaacaaagccctcccagcccccatcgagaaaaccatctccaaagccaaagggcagccccgagaaccacaggtgtacaccctgcccccatcccgggatgagctgaccaagaaccaggtcagcctgacctgcctggtcaaaggcttctatccaagcgacatcgccgtggagtgggagagcaatgggcagccggagaacaactacaagaccacgcctcccgtgctggactccgacggctccttcttcctctacagcaagctcaccgtggacaagagcaggtggcagcaggggaacgtcttctcatgctccgtgatgcatgaggctctgcacaaccactacacgcagaagagcctctccctgtctccgggtaaatctagagcctccaccaagggcccatcggtcttccccctggcaccctcctccaagagcacctctgggggcacagcggccctgggctgcctggtcaaggactacttccccgagccggtgacggtgtcgtggaactcaggcgccctgaccagcggcgtgcacaccttcccggctgtcctacagtcctcaggactctactccctcagcagcgtggtgaccgtgccctccagcagcttgggcacccagacctacatctgcaacgtgaatcacaagcccagcaacaccaaggtggacaagaaagtttga

SEQ ID NO: 50 - DNA, 1788 bp, Artificial Sequence
  Nucleotide sequence for TSC017 comprising : P2C2 (anti-CD79b) scFv, human IgG1 SCC-P hinge, human IgG1 CH2, human IgG1 CH3 and human CH1
atggaagcaccagcgcagcttctcttcctcctgctactctggctcccagataccaccggtgatattgtgatgatccaggatgaactctccaatcctgtcagttctggagaatcagtttccatctcctgtaggtctagtaagagtctcctagataaggaagggaagacatacttgaattggtttctgcagagaccaggacaatctcctcagctcctgatctatctgatgtccatgcgtgaatcaggagtctcagaccggtttagtggcagtgggtcaggaacagatttcaccctggaaatcagtagagtgaaggctgaggatgtgggtgtgtattactgtcaacaacttgtagagtatccgtggacgttcggtggaggcaccaagctggaaatcaaaggtggcggtggctctggcggaggtggatccggtggcggcggctctcagatccagttggtgcagtctggacctgagctgaagaagcctggagagacagtcaagatctcctgcaaggcttctggttataccttcacagacttttcaatgcactgggtgaggcaggctccaggaaagggtttaaagtggatgggctggataaacactgagactggtgagccaacatatgcagatgacttcaggggacggtttgccttctctttggaaacttctgccagcactgcctatttgcagatcaacaacctcaaaaatgaggacacggctacatatttttgtacctggtctgcttactggggccaagggactctggtcactgtctctgcctcgagcgagcccaaatcttctgacaaaactcacacatgcccaccgtgcccatccggagcacctgaactcctgggtggaccgtcagtcttcctcttccccccaaaacccaaggacaccctcatgatctcccggacccctgaggtcacatgcgtggtggtggacgtgagccacgaagaccctgaggtcaagttcaactggtacgtggacggcgtggaggtgcataatgccaagacaaagccgcgggaggagcagtacaacagcacgtaccgtgtggtcagcgtcctcaccgtcctgcaccaggactggctgaatggcaaggagtacaagtgcaaggtctccaacaaagccctcccagcccccatcgagaaaaccatctccaaagccaaagggcagccccgagaaccacaggtgtacaccctgcccccatcccgggatgagctgaccaagaaccaggtcagcctgacctgcctggtcaaaggcttctatccaagcgacatcgccgtggagtgggagagcaatgggcagccggagaacaactacaagaccacgcctcccgtgctggactccgacggctccttcttcctctacagcaagctcaccgtggacaagagcaggtggcagcaggggaacgtcttctcatgctccgtgatgcatgaggctctgcacaaccactacacgcagaagagcctctccctgtctccgggtaaatctagagcctccaccaagggcccatcggtcttccccctggcaccctcctccaagagcacctctgggggcacagcggccctgggctgcctggtcaaggactacttccccgagccggtgacggtgtcgtggaactcaggcgccctgaccagcggcgtgcacaccttcccggctgtcctacagtcctcaggactctactccctcagcagcgtggtgaccgtgccctccagcagcttgggcacccagacctacatctgcaacgtgaatcacaagcccagcaacaccaaggtggacaagaaagtttga

SEQ ID NO: 51 - DNA, 1812 bp, Artificial Sequence
  Nucleotide sequence for TSC018 comprising : M0042 (anti-HLA-DR) scFv, human IgG1 SCC-P hinge, human IgG1 CH2, human IgG1 CH3, and human CH1
atggaagcaccagcgcagcttctcttcctcctgctactctggctcccagataccaccggtgacatccagatgacccagtctccttccaccctgtctgcatctgtaggagacagagtcaccatcacttgccgggccagtcagagtattagtagctggttggcctggtatcagcagaaaccagggaaagcccctaagctcctggtctattctgtttccagtttgcaaagtggggtcccatcaaggttcagtggcagtggatccgggacagatttcactctcaccatcaacagtctgcaacctgaagattttgccacttactactgtcaacagagttacagtaccccattcactttcggccctgggaccaaagtggatatcaaagggggtggaggctctggtggcggtggctctggcggaggtggatccggtggcggcggctctgaagttcaattgttagagtctggtggcggtcttgttcagcctggtggttctttacgtctttcttgcgctgcttccggattcactttctctcattactatatgtcttgggttcgccaagctcctggtaaaggtttggagtgggtttcttatatcggtccttctggtggctttactgcttatgctgactccgttaaaggtcgcttcactatctctagagacaactctaagaatactctctacttgcagatgaacagcttaagggctgaggacacggccgtgtattactgtgcgagagacgggtgggttggtagcgagaactactccggtatggacgtctggggccaagggaccacggtctcctcgagcgagcccaaatcttctgacaaaactcacacatgcccaccgtgcccatccggagcacctgaactcctgggtggaccgtcagtcttcctcttccccccaaaacccaaggacaccctcatgatctcccggacccctgaggtcacatgcgtggtggtggacgtgagccacgaagaccctgaggtcaagttcaactggtacgtggacggcgtggaggtgcataatgccaagacaaagccgcgggaggagcagtacaacagcacgtaccgtgtggtcagcgtcctcaccgtcctgcaccaggactggctgaatggcaaggagtacaagtgcaaggtctccaacaaagccctcccagcccccatcgagaaaaccatctccaaagccaaagggcagccccgagaaccacaggtgtacaccctgcccccatcccgggatgagctgaccaagaaccaggtcagcctgacctgcctggtcaaaggcttctatccaagcgacatcgccgtggagtgggagagcaatgggcagccggagaacaactacaagaccacgcctcccgtgctggactccgacggctccttcttcctctacagcaagctcaccgtggacaagagcaggtggcagcaggggaacgtcttctcatgctccgtgatgcatgaggctctgcacaaccactacacgcagaagagcctctccctgtctccgggtaaatctagagcctccaccaagggcccatcggtcttccccctggcaccctcctccaagagcacctctgggggcacagcggccctgggctgcctggtcaaggactacttccccgagccggtgacggtgtcgtggaactcaggcgccctgaccagcggcgtgcacaccttcccggctgtcctacagtcctcaggactctactccctcagcagcgtggtgaccgtgccctccagcagcttgggcacccagacctacatctgcaacgtgaatcacaagcccagcaacaccaaggtggacaagaaagtttga

SEQ ID NO: 52 - DNA, 1833 bp, Artificial Sequence
  Nucleotide sequence for TSC019 comprising : G19-4 (anti-CD3) scFv, human IgG1 SCC-P hinge, human CH2, human CH3, and human Ck(YAE)
atggaagcaccagcgcagcttctcttcctcctgctactctggctcccagataccaccggtgaggtccagctgcaacagtctggacctgaactggtgaagcctggagcttcaatgaagatttcctgcaaggcctctggttactcattcactggctacatcgtgaactggctgaagcagagccatggaaagaaccttgagtggattggacttattaatccatacaaaggtcttactacctacaaccagaaattcaagggcaaggccacattaactgtagacaagtcatccagcacagcctacatggagctcctcagtctgacatctgaagactctgcagtctattactgtgcaagatctgggtactatggtgactcggactggtacttcgatgtctggggcgcagggaccacggtcaccgtctcaagcggtggcggagggtctgggggtggcggatccggaggtggtggctctgcacaagacatccagatgacacagactacatcctccctgtctgcctctctgggagacagagtcaccatcagttgcagggcaagtcaggacattcgcaattatttaaactggtatcagcagaaaccagatggaactgttaaactcctgatctactacacatcaagattacactcaggagtcccatcaaggttcagtggcagtgggtctggaacagattattctctcaccattgccaacctgcaaccagaagatattgccacttacttttgccaacagggtaatacgcttccgtggacgttcggtggaggcaccaaactggtaaccaaacgctcgagcgagcccaaatcttctgacaaaactcacacatgcccaccgtgcccatccggagcacctgaactcctgggtggaccgtcagtcttcctcttccccccaaaacccaaggacaccctcatgatctcccggacccctgaggtcacatgcgtggtggtggacgtgagccacgaagaccctgaggtcaagttcaactggtacgtggacggcgtggaggtgcataatgccaagacaaagccgcgggaggagcagtacaacagcacgtaccgtgtggtcagcgtcctcaccgtcctgcaccaggactggctgaatggcaaggagtacaagtgcaaggtctccaacaaagccctcccagcccccatcgagaaaaccatctccaaagccaaagggcagccccgagaaccacaggtgtacaccctgcccccatcccgggatgagctgaccaagaaccaggtcagcctgacctgcctggtcaaaggcttctatccaagcgacatcgccgtggagtgggagagcaatgggcagccggagaacaactacaagaccacgcctcccgtgctggactccgacggctccttcttcctctacagcaagctcaccgtggacaagagcaggtggcagcaggggaacgtcttctcatgctccgtgatgcatgaggctctgcacaaccactacacgcagaagagcctctccctgtctccgggtaaatctagaactgtggctgcaccatctgtcttcatcttcccgccatctgatgagcagttgaaatctggaactgcctctgttgtgtgcctgctgaattacttctatcccagagaggccaaagtacagtggaaggtggataacgccctccaatcgggtaactcccaggagagtgccacagagcaggacagcaaggacagcacctacagcctcagcagcgagctgacgctgagcaaagcagactacgagaaacacaaagtctacgcctgcgaagtcacccatcagggcctgagctcgcccgtcacaaagagcttcaacaggggagagtga

SEQ ID NO: 53 - protein, 582 aa, Artificial Sequence
  ORN160 mature protein comprising : 5D5 (anti-c-Met) scFv, human IgG1 SCC-P hinge, human IgG1 CH2, human IgG1 CH3, and human CH1
DFMMSQSPSSLTVSVGEKVTVSCKSSQSLLYTSSQKNYLAWYQQKPGQSPKLLIYWASTRESGVPDRFTGSGSGTDFTLTITSVKADDLAVYYCQQYYAYPWTFGGGTKLELKGGGGSGGGGSGGGGSQVQLQQSGPELVRPGASVKMSCRASGYTFTSYWLHWVKQRPGQGLEWIGMIDPSNSDTRFNPNFKDKATLNVDRSSNTAYMLLSSLTSADSAVYYCATYGSYVSPLDYWGQGTSVTVSSSEPKSSDKTHTCPPCPSGAPELLGGPSVFLFPPKPKDTLMISRTPEVTCVVVDVSHEDPEVKFNWYVDGVEVHNAKTKPREEQYNSTYRVVSVLTVLHQDWLNGKEYKCKVSNKALPAPIEKTISKAKGQPREPQVYTLPPSRDELTKNQVSLTCLVKGFYPSDIAVEWESNGQPENNYKTTPPVLDSDGSFFLYSKLTVDKSRWQQGNVFSCSVMHEALHNHYTQKSLSLSPGKSRASTKGPSVFPLAPSSKSTSGGTAALGCLVKDYFPEPVTVSWNSGALTSGVHTFPAVLQSSGLYSLSSVVTVPSSSLGTQTYICNVNHKPSNTKVDKKV

SEQ ID NO: 54 - protein, 586 aa, Artificial Sequence
  TSC001 mature protein comprising : HD37 (anti-CD39), human IgG1 SCC-P hinge, human IgG1 CH2, human IgG1 CH3 and human CH1
DIVLTQSPASLAVSLGQRATISCKASQSVDYDGDSYLNWYQQIPGQPPKLLIYDASNLVSGIPPRFSGSGSGTDFTLNIHPVEKVDAATYHCQQSTEDPWTFGGGTKLEIKGGGGSGGGGSGGGGASQVQLQQSGAELVRPGSSVKISCKASGYAFSSYWMNWVKQRPGQGLEWIGQIWPGDGDTNYNGKFKGKATLTADESSSTAYMQLSSLASEDSAVYFCARRETTTVGRYYYAMDYWGQGTSVTVSSSEPKSSDKTHTCPPCPSGAPELLGGPSVFLFPPKPKDTLMISRTPEVTCVVVDVSHEDPEVKFNWYVDGVEVHNAKTKPREEQYNSTYRVVSVLTVLHQDWLNGKEYKCKVSNKALPAPIEKTISKAKGQPREPQVYTLPPSRDELTKNQVSLTCLVKGFYPSDIAVEWESNGQPENNYKTTPPVLDSDGSFFLYSKLTVDKSRWQQGNVFSCSVMHEALHNHYTQKSLSLSPGKSRASTKGPSVFPLAPSSKSTSGGTAALGCLVKDYFPEPVTVSWNSGALTSGVHTFPAVLQSSGLYSLSSVVTVPSSSLGTQTYICNVNHKPSNTKVDKKV

SEQ ID NO: 55 - protein, 579 aa, Artificial Sequence
  TSC002 mature protein comprising : 2H7 (anti-CD20) scFv, human IgG1 SCC-P hinge, human IgG1 CH2, human IgG1 CH3 and human CH1
QIVLSQSPAILSASPGEKVTMTCRASSSVSYMHWYQQKPGSSPKPWIYAPSNLASGVPARFSGSGSGTSYSLTISRVEAEDAATYYCQQWSFNPPTFGAGTKLELKDGGGSGGGGSGGGGASQAYLQQSGAESVRPGASVKMSCKASGYTFTSYNMHWVKQTPRQGLEWIGAIYPGNGDTSYNQKFKGKATLTVDKSSSTAYMQLSSLTSEDSAVYFCARVVYYSNSYWYFDVWGTGTTVTVSSSEPKSSDKTHTCPPCPSGAPELLGGPSVFLFPPKPKDTLMISRTPEVTCVVVDVSHEDPEVKFNWYVDGVEVHNAKTKPREEQYNSTYRVVSVLTVLHQDWLNGKEYKCKVSNKALPAPIEKTISKAKGQPREPQVYTLPPSRDELTKNQVSLTCLVKGFYPSDIAVEWESNGQPENNYKTTPPVLDSDGSFFLYSKLTVDKSRWQQGNVFSCSVMHEALHNHYTQKSLSLSPGKSRASTKGPSVFPLAPSSKSTSGGTAALGCLVKDYFPEPVTVSWNSGALTSGVHTFPAVLQSSGLYSLSSVVTVPSSSLGTQTYICNVNHKPSNTKVDKKV

SEQ ID NO: 56 - protein, 596 aa, Artificial Sequence
  TSC003 mature protein comprising : G19-4 (anti-CD3) scFv, altered human IgA1 hinge,  human IgG1 CH2, human IgG1 CH3, and human Ck(YAE)
EVQLQQSGPELVKPGASMKISCKASGYSFTGYIVNWLKQSHGKNLEWIGLINPYKGLTTYNQKFKGKATLTVDKSSSTAYMELLSLTSEDSAVYYCARSGYYGDSDWYFDVWGAGTTVTVSSGGGGSGGGGSGGGGSAQDIQMTQTTSSLSASLGDRVTISCRASQDIRNYLNWYQQKPDGTVKLLIYYTSRLHSGVPSRFSGSGSGTDYSLTIANLQPEDIATYFCQQGNTLPWTFGGGTKLVTKRSSPSTPPTPSPSTPPTPSPSCPPCPAPELLGGPSVFLFPPKPKDTLMISRTPEVTCVVVDVSHEDPEVKFNWYVDGVEVHNAKTKPREEQYNSTYRVVSVLTVLHQDWLNGKEYKCKVSNKALPAPIEKTISKAKGQPREPQVYTLPPSRDELTKNQVSLTCLVKGFYPSDIAVEWESNGQPENNYKTTPPVLDSDGSFFLYSKLTVDKSRWQQGNVFSCSVMHEALHNHYTQKSLSLSPGKSRTVAAPSVFIFPPSDEQLKSGTASVVCLLNYFYPREAKVQWKVDNALQSGNSQESATEQDSKDSTYSLSSELTLSKADYEKHKVYACEVTHQGLSSPVTKSFNRGE

SEQ ID NO: 57 - protein, 583 aa, Artificial Sequence
  TSC004 mature protein comprising : G19-4 (anti-CD3) scFv, altered human IgA2 hinge, human IgG1 CH2, human IgG1 CH3, and human Ck(YAE)
EVQLQQSGPELVKPGASMKISCKASGYSFTGYIVNWLKQSHGKNLEWIGLINPYKGLTTYNQKFKGKATLTVDKSSSTAYMELLSLTSEDSAVYYCARSGYYGDSDWYFDVWGAGTTVTVSSGGGGSGGGGSGGGGSAQDIQMTQTTSSLSASLGDRVTISCRASQDIRNYLNWYQQKPDGTVKLLIYYTSRLHSGVPSRFSGSGSGTDYSLTIANLQPEDIATYFCQQGNTLPWTFGGGTKLVTKRSSPPPPPCPPCPAPELLGGPSVFLFPPKPKDTLMISRTPEVTCVVVDVSHEDPEVKFNWYVDGVEVHNAKTKPREEQYNSTYRVVSVLTVLHQDWLNGKEYKCKVSNKALPAPIEKTISKAKGQPREPQVYTLPPSRDELTKNQVSLTCLVKGFYPSDIAVEWESNGQPENNYKTTPPVLDSDGSFFLYSKLTVDKSRWQQGNVFSCSVMHEALHNHYTQKSLSLSPGKSRTVAAPSVFIFPPSDEQLKSGTASVVCLLNYFYPREAKVQWKVDNALQSGNSQESATEQDSKDSTYSLSSELTLSKADYEKHKVYACEVTHQGLSSPVTKSFNRGE

SEQ ID NO: 58 - protein, 593 aa, Artificial Sequence
  TSC005 mature protein comprising : G19-4 (anti-CD3) scFv, altered human IgG3 hinge, human IgG1 CH2, human IgG1 CH3, and human Ck(YAE)
EVQLQQSGPELVKPGASMKISCKASGYSFTGYIVNWLKQSHGKNLEWIGLINPYKGLTTYNQKFKGKATLTVDKSSSTAYMELLSLTSEDSAVYYCARSGYYGDSDWYFDVWGAGTTVTVSSGGGGSGGGGSGGGGSAQDIQMTQTTSSLSASLGDRVTISCRASQDIRNYLNWYQQKPDGTVKLLIYYTSRLHSGVPSRFSGSGSGTDYSLTIANLQPEDIATYFCQQGNTLPWTFGGGTKLVTKRSSEPKSSDTPPPSPRSPCPPCPAPELLGGPSVFLFPPKPKDTLMISRTPEVTCVVVDVSHEDPEVKFNWYVDGVEVHNAKTKPREEQYNSTYRVVSVLTVLHQDWLNGKEYKCKVSNKALPAPIEKTISKAKGQPREPQVYTLPPSRDELTKNQVSLTCLVKGFYPSDIAVEWESNGQPENNYKTTPPVLDSDGSFFLYSKLTVDKSRWQQGNVFSCSVMHEALHNHYTQKSLSLSPGKSRTVAAPSVFIFPPSDEQLKSGTASVVCLLNYFYPREAKVQWKVDNALQSGNSQESATEQDSKDSTYSLSSELTLSKADYEKHKVYACEVTHQGLSSPVTKSFNRGE

SEQ ID NO: 59 - protein, 612 aa, Artificial Sequence
  TSC006 mature protein comprising : G19-4 (anti-CD3) scFv, altered human IgD hinge, human IgG1 CH2, human IgG1 CH3, and human Ck(YAE)
  VARIANT 375: Xaa = Any Amino Acid
EVQLQQSGPELVKPGASMKISCKASGYSFTGYIVNWLKQSHGKNLEWIGLINPYKGLTTYNQKFKGKATLTVDKSSSTAYMELLSLTSEDSAVYYCARSGYYGDSDWYFDVWGAGTTVTVSSGGGGSGGGGSGGGGSAQDIQMTQTTSSLSASLGDRVTISCRASQDIRNYLNWYQQKPDGTVKLLIYYTSRLHSGVPSRFSGSGSGTDYSLTIANLQPEDIATYFCQQGNTLPWTFGGGTKLVTKRSSESPKAQASSVPTAQPQAEGSLAKATTAPATTRNTCPPCPAPELLGGPSVFLFPPKPKDTLMISRTPEVTCVVVDVSHEDPEVKFNWYVDGVEVHNAKTKPREEQYNSTYRVVSVLTVLHQDWLNGXEYKCKVSNKALPAPIEKTISKAKGQPREPQVYTLPPSRDELTKNQVSLTCLVKGFYPSDIAVEWESNGQPENNYKTTPPVLDSDGSFFLYSKLTVDKSRWQQGNVFSCSVMHEALHNHYTQKSLSLSPGKSRTVAAPSVFIFPPSDEQLKSGTASVVCLLNYFYPREAKVQWKVDNALQSGNSQESATEQDSKDSTYSLSSELTLSKADYEKHKVYACEVTHQGLSSPVTKSFNRGE

SEQ ID NO: 60 - protein, 593 aa, Artificial Sequence
  TSC007 mature protein comprising : G19-4 (anti-CD3) scFv, altered human IgG1 hinge, human IgG1 CH2, human IgG1 CH3, and human Ck(YAE)
EVQLQQSGPELVKPGASMKISCKASGYSFTGYIVNWLKQSHGKNLEWIGLINPYKGLTTYNQKFKGKATLTVDKSSSTAYMELLSLTSEDSAVYYCARSGYYGDSDWYFDVWGAGTTVTVSSGGGGSGGGGSGGGGSAQDIQMTQTTSSLSASLGDRVTISCRASQDIRNYLNWYQQKPDGTVKLLIYYTSRLHSGVPSRFSGSGSGTDYSLTIANLQPEDIATYFCQQGNTLPWTFGGGTKLVTKRSSEPKSSDKTHTSPPSPCPPCPAPELLGGPSVFLFPPKPKDTLMISRTPEVTCVVVDVSHEDPEVKFNWYVDGVEVHNAKTKPREEQYNSTYRVVSVLTVLHQDWLNGKEYKCKVSNKALPAPIEKTISKAKGQPREPQVYTLPPSRDELTKNQVSLTCLVKGFYPSDIAVEWESNGQPENNYKTTPPVLDSDGSFFLYSKLTVDKSRWQQGNVFSCSVMHEALHNHYTQKSLSLSPGKSRTVAAPSVFIFPPSDEQLKSGTASVVCLLNYFYPREAKVQWKVDNALQSGNSQESATEQDSKDSTYSLSSELTLSKADYEKHKVYACEVTHQGLSSPVTKSFNRGE

SEQ ID NO: 61 - protein, 684 aa, Artificial Sequence
  TSC008 mature protein comprising : G19-4 (anti-CD3) scFv, altered human IgE CH2 hinge (SEQ ID NO:757), human IgG1 CH2, human IgG1 CH3, and human Ck(YAE)
EVQLQQSGPELVKPGASMKISCKASGYSFTGYIVNWLKQSHGKNLEWIGLINPYKGLTTYNQKFKGKATLTVDKSSSTAYMELLSLTSEDSAVYYCARSGYYGDSDWYFDVWGAGTTVTVSSGGGGSGGGGSGGGGSAQDIQMTQTTSSLSASLGDRVTISCRASQDIRNYLNWYQQKPDGTVKLLIYYTSRLHSGVPSRFSGSGSGTDYSLTIANLQPEDIATYFCQQGNTLPWTFGGGTKLVTKRSSSRDFTPPTVKILQSSSDGGGHFPPTIQLLCLVSGYTPGTINITWLEDGQVMDVDLSTASTTQEGELASTQSELTLSQKHWLSDRTYTCQVTYQGHTFEDSTKKSACPPCSGAPELLGGPSVFLFPPKPKDTLMISRTPEVTCVVVDVSHEDPEVKFNWYVDGVEVHNAKTKPREEQYNSTYRVVSVLTVLHQDWLNGKEYKCKVSNKALPAPIEKTISKAKGQPREPQVYTLPPSRDELTKNQVSLTCLVKGFYPSDIAVEWESNGQPENNYKTTPPVLDSDGSFFLYSKLTVDKSRWQQGNVFSCSVMHEALHNHYTQKSLSLSPGKSRTVAAPSVFIFPPSDEQLKSGTASVVCLLNYFYPREAKVQWKVDNALQSGNSQESATEQDSKDSTYSLSSELTLSKADYEKHKVYACEVTHQGLSSPVTKSFNRGE

SEQ ID NO: 62 - protein, 691 aa, Artificial Sequence [sequence omitted]

SEQ ID NO: 63 - protein, 592 aa, Artificial Sequence
  TSC010 mature protein comprising : HD37 (anti-CD19) scFv, altered human IgA1 hinge, human IgG1 CH2, human IgG1 CH3, and human CH1
DIVLTQSPASLAVSLGQRATISCKASQSVDYDGDSYLNWYQQIPGQPPKLLIYDASNLVSGIPPRFSGSGSGTDFTLNIHPVEKVDAATYHCQQSTEDPWTFGGGTKLEIKGGGGSGGGGSGGGGASQVQLQQSGAELVRPGSSVKISCKASGYAFSSYWMNWVKQRPGQGLEWIGQIWPGDGDTNYNGKFKGKATLTADESSSTAYMQLSSLASEDSAVYFCARRETTTVGRYYYAMDYWGQGTSVTVSSSPSTPPTPSPSTPPTPSPSCPPCPAPELLGGPSVFLFPPKPKDTLMISRTPEVTCVVVDVSHEDPEVKFNWYVDGVEVHNAKTKPREEQYNSTYRVVSVLTVLHQDWLNGKEYKCKVSNKALPAPIEKTISKAKGQPREPQVYTLPPSRDELTKNQVSLTCLVKGFYPSDIAVEWESNGQPENNYKTTPPVLDSDGSFFLYSKLTVDKSRWQQGNVFSCSVMHEALHNHYTQKSLSLSPGKSRASTKGPSVFPLAPSSKSTSGGTAALGCLVKDYFPEPVTVSWNSGALTSGVHTFPAVLQSSGLYSLSSVVTVPSSSLGTQTYICNVNHKPSNTKVDKKV

SEQ ID NO: 64 - protein, 579 aa, Artificial Sequence
  TSC011 mature protein comprising : HD37 (anti-CD19) scFv, altered human IgA2 hinge, human IgG1 CH2, human IgG1 CH3, and human CH1
DIVLTQSPASLAVSLGQRATISCKASQSVDYDGDSYLNWYQQIPGQPPKLLIYDASNLVSGIPPRFSGSGSGTDFTLNIHPVEKVDAATYHCQQSTEDPWTFGGGTKLEIKGGGGSGGGGSGGGGASQVQLQQSGAELVRPGSSVKISCKASGYAFSSYWMNWVKQRPGQGLEWIGQIWPGDGDTNYNGKFKGKATLTADESSSTAYMQLSSLASEDSAVYFCARRETTTVGRYYYAMDYWGQGTSVTVSSSPPPPPCPPCPAPELLGGPSVFLFPPKPKDTLMISRTPEVTCVVVDVSHEDPEVKFNWYVDGVEVHNAKTKPREEQYNSTYRVVSVLTVLHQDWLNGKEYKCKVSNKALPAPIEKTISKAKGQPREPQVYTLPPSRDELTKNQVSLTCLVKGFYPSDIAVEWESNGQPENNYKTTPPVLDSDGSFFLYSKLTVDKSRWQQGNVFSCSVMHEALHNHYTQKSLSLSPGKSRASTKGPSVFPLAPSSKSTSGGTAALGCLVKDYFPEPVTVSWNSGALTSGVHTFPAVLQSSGLYSLSSVVTVPSSSLGTQTYICNVNHKPSNTKVDKKV

SEQ ID NO: 65 - protein, 589 aa, Artificial Sequence
  TSC012 mature protein comprising : HD37 (anti-CD19) scFv, altered human IgG1 hinge,  human IgG1 CH2, human IgG1 CH3, and human CH1
DIVLTQSPASLAVSLGQRATISCKASQSVDYDGDSYLNWYQQIPGQPPKLLIYDASNLVSGIPPRFSGSGSGTDFTLNIHPVEKVDAATYHCQQSTEDPWTFGGGTKLEIKGGGGSGGGGSGGGGASQVQLQQSGAELVRPGSSVKISCKASGYAFSSYWMNWVKQRPGQGLEWIGQIWPGDGDTNYNGKFKGKATLTADESSSTAYMQLSSLASEDSAVYFCARRETTTVGRYYYAMDYWGQGTSVTVSSSEPKSSDKTHTSPPSPCPPCPAPELLGGPSVFLFPPKPKDTLMISRTPEVTCVVVDVSHEDPEVKFNWYVDGVEVHNAKTKPREEQYNSTYRVVSVLTVLHQDWLNGKEYKCKVSNKALPAPIEKTISKAKGQPREPQVYTLPPSRDELTKNQVSLTCLVKGFYPSDIAVEWESNGQPENNYKTTPPVLDSDGSFFLYSKLTVDKSRWQQGNVFSCSVMHEALHNHYTQKSLSLSPGKSRASTKGPSVFPLAPSSKSTSGGTAALGCLVKDYFPEPVTVSWNSGALTSGVHTFPAVLQSSGLYSLSSVVTVPSSSLGTQTYICNVNHKPSNTKVDKKV

SEQ ID NO: 66 - protein, 589 aa, Artificial Sequence
  TSC013 mature protein comprising : HD37 (anti-CD19) scFv, altered human IgG3 hinge, human IgG1 CH2, human IgG1 CH3, and human CH1
DIVLTQSPASLAVSLGQRATISCKASQSVDYDGDSYLNWYQQIPGQPPKLLIYDASNLVSGIPPRFSGSGSGTDFTLNIHPVEKVDAATYHCQQSTEDPWTFGGGTKLEIKGGGGSGGGGSGGGGASQVQLQQSGAELVRPGSSVKISCKASGYAFSSYWMNWVKQRPGQGLEWIGQIWPGDGDTNYNGKFKGKATLTADESSSTAYMQLSSLASEDSAVYFCARRETTTVGRYYYAMDYWGQGTSVTVSSSEPKSSDTPPPSPRSPCPPCPAPELLGGPSVFLFPPKPKDTLMISRTPEVTCVVVDVSHEDPEVKFNWYVDGVEVHNAKTKPREEQYNSTYRVVSVLTVLHQDWLNGKEYKCKVSNKALPAPIEKTISKAKGQPREPQVYTLPPSRDELTKNQVSLTCLVKGFYPSDIAVEWESNGQPENNYKTTPPVLDSDGSFFLYSKLTVDKSRWQQGNVFSCSVMHEALHNHYTQKSLSLSPGKSRASTKGPSVFPLAPSSKSTSGGTAALGCLVKDYFPEPVTVSWNSGALTSGVHTFPAVLQSSGLYSLSSVVTVPSSSLGTQTYICNVNHKPSNTKVDKKV

SEQ ID NO: 67 - protein, 608 aa, Artificial Sequence
  TSC014 mature protein comprising : HD37 (anti-CD19) scFv, altered human IgD hinge, human IgG1 CH2, human IgG1 CH3, and human CH1
DIVLTQSPASLAVSLGQRATISCKASQSVDYDGDSYLNWYQQIPGQPPKLLIYDASNLVSGIPPRFSGSGSGTDFTLNIHPVEKVDAATYHCQQSTEDPWTFGGGTKLEIKGGGGSGGGGSGGGGASQVQLQQSGAELVRPGSSVKISCKASGYAFSSYWMNWVKQRPGQGLEWIGQIWPGDGDTNYNGKFKGKATLTADESSSTAYMQLSSLASEDSAVYFCARRETTTVGRYYYAMDYWGQGTSVTVSSSESPKAQASSVPTAQPQAEGSLAKATTAPATTRNTCPPCPAPELLGGPSVFLFPPKPKDTLMISRTPEVTCVVVDVSHEDPEVKFNWYVDGVEVHNAKTKPREEQYNSTYRVVSVLTVLHQDWLNGKEYKCKVSNKALPAPIEKTISKAKGQPREPQVYTLPPSRDELTKNQVSLTCLVKGFYPSDIAVEWESNGQPENNYKTTPPVLDSDGSFFLYSKLTVDKSRWQQGNVFSCSVMHEALHNHYTQKSLSLSPGKSRASTKGPSVFPLAPSSKSTSGGTAALGCLVKDYFPEPVTVSWNSGALTSGVHTFPAVLQSSGLYSLSSVVTVPSSSLGTQTYICNVNHKPSNTKVDKKV

SEQ ID NO: 68 - protein, 680 aa, Artificial Sequence
  TSC015 mature protein comprising : HD37 (anti-CD19) scFv, altered human IgE CH2 hinge, human IgG1 CH2, human IgG1 CH3, and human CH1
DIVLTQSPASLAVSLGQRATISCKASQSVDYDGDSYLNWYQQIPGQPPKLLIYDASNLVSGIPPRFSGSGSGTDFTLNIHPVEKVDAATYHCQQSTEDPWTFGGGTKLEIKGGGGSGGGGSGGGGASQVQLQQSGAELVRPGSSVKISCKASGYAFSSYWMNWVKQRPGQGLEWIGQIWPGDGDTNYNGKFKGKATLTADESSSTAYMQLSSLASEDSAVYFCARRETTTVGRYYYAMDYWGQGTSVTVSSSSRDFTPPTVKILQSSSDGGGHFPPTIQLLCLVSGYTPGTINITWLEDGQVMDVDLSTASTTQEGELASTQSELTLSQKHWLSDRTYTCQVTYQGHTFEDSTKKSACPPCSGAPELLGGPSVFLFPPKPKDTLMISRTPEVTCVVVDVSHEDPEVKFNWYVDGVEVHNAKTKPREEQYNSTYRVVSVLTVLHQDWLNGKEYKCKVSNKALPAPIEKTISKAKGQPREPQVYTLPPSRDELTKNQVSLTCLVKGFYPSDIAVEWESNGQPENNYKTTPPVLDSDGSFFLYSKLTVDKSRWQQGNVFSCSVMHEALHNHYTQKSLSLSPGKSRASTKGPSVFPLAPSSKSTSGGTAALGCLVKDYFPEPVTVSWNSGALTSGVHTFPAVLQSSGLYSLSSVVTVPSSSLGTQTYICNVNHKPSNTKVDKKV

SEQ ID NO: 69 - protein, 687 aa, Artificial Sequence
  TSC016 mature protein comprising : HD37 (anti-CD19) scFv, altered human IgM CH2 hinge, human IgG1 CH2, human IgG1 CH3, and human CH1
DIVLTQSPASLAVSLGQRATISCKASQSVDYDGDSYLNWYQQIPGQPPKLLIYDASNLVSGIPPRFSGSGSGTDFTLNIHPVEKVDAATYHCQQSTEDPWTFGGGTKLEIKGGGGSGGGGSGGGGASQVQLQQSGAELVRPGSSVKISCKASGYAFSSYWMNWVKQRPGQGLEWIGQIWPGDGDTNYNGKFKGKATLTADESSSTAYMQLSSLASEDSAVYFCARRETTTVGRYYYAMDYWGQGTSVTVSSSIAELPPKVSVFVPPRDGFFGNPRKSKLICQATGFSPRQIQVSWLREGKQVGSGVTTDQVQAEAKESGPTTYKVTSTLTIKESDWLSQSMFTCRVDHRGLTFQQNASSMSVPCPPCPSGAPELLGGPSVFLFPPKPKDTLMISRTPEVTCVVVDVSHEDPEVKFNWYVDGVEVHNAKTKPREEQYNSTYRVVSVLTVLHQDWLNGKEYKCKVSNKALPAPIEKTISKAKGQPREPQVYTLPPSRDELTKNQVSLTCLVKGFYPSDIAVEWESNGQPENNYKTTPPVLDSDGSFFLYSKLTVDKSRWQQGNVFSCSVMHEALHNHYTQKSLSLSPGKSRASTKGPSVFPLAPSSKSTSGGTAALGCLVKDYFPEPVTVSWNSGALTSGVHTFPAVLQSSGLYSLSSVVTVPSSSLGTQTYICNVNHKPSNTKVDKKV

SEQ ID NO: 70 - protein, 575 aa, Artificial Sequence
  TSC017 mature protein comprising : P2C2 (anti-CD79b) scFv, human IgG1 SCC-P hinge, human IgG1 CH2, human IgG1 CH3 and human CH1
DIVMIQDELSNPVSSGESVSISCRSSKSLLDKEGKTYLNWFLQRPGQSPQLLIYLMSMRESGVSDRFSGSGSGTDFTLEISRVKAEDVGVYYCQQLVEYPWTFGGGTKLEIKGGGGSGGGGSGGGGSQIQLVQSGPELKKPGETVKISCKASGYTFTDFSMHWVRQAPGKGLKWMGWINTETGEPTYADDFRGRFAFSLETSASTAYLQINNLKNEDTATYFCTWSAYWGQGTLVTVSASSEPKSSDKTHTCPPCPSGAPELLGGPSVFLFPPKPKDTLMISRTPEVTCVVVDVSHEDPEVKFNWYVDGVEVHNAKTKPREEQYNSTYRVVSVLTVLHQDWLNGKEYKCKVSNKALPAPIEKTISKAKGQPREPQVYTLPPSRDELTKNQVSLTCLVKGFYPSDIAVEWESNGQPENNYKTTPPVLDSDGSFFLYSKLTVDKSRWQQGNVFSCSVMHEALHNHYTQKSLSLSPGKSRASTKGPSVFPLAPSSKSTSGGTAALGCLVKDYFPEPVTVSWNSGALTSGVHTFPAVLQSSGLYSLSSVVTVPSSSLGTQTYICNVNHKPSNTKVDKKV

SEQ ID NO: 71 - protein, 583 aa, Artificial Sequence
  TSC018 mature protein comprising : M0042 (anti-HLA-DR) scFv, human IgG1 SCC-P hinge, human IgG1 CH2, human IgG1 CH3, and human CH1
DIQMTQSPSTLSASVGDRVTITCRASQSISSWLAWYQQKPGKAPKLLVYSVSSLQSGVPSRFSGSGSGTDFTLTINSLQPEDFATYYCQQSYSTPFTFGPGTKVDIKGGGGSGGGGSGGGGSGGGGSEVQLLESGGGLVQPGGSLRLSCAASGFTFSHYYMSWVRQAPGKGLEWVSYIGPSGGFTAYADSVKGRFTISRDNSKNTLYLQMNSLRAEDTAVYYCARDGWVGSENYSGMDVWGQGTTVSSSEPKSSDKTHTCPPCPSGAPELLGGPSVFLFPPKPKDTLMISRTPEVTCVVVDVSHEDPEVKFNWYVDGVEVHNAKTKPREEQYNSTYRVVSVLTVLHQDWLNGKEYKCKVSNKALPAPIEKTISKAKGQPREPQVYTLPPSRDELTKNQVSLTCLVKGFYPSDIAVEWESNGQPENNYKTTPPVLDSDGSFFLYSKLTVDKSRWQQGNVFSCSVMHEALHNHYTQKSLSLSPGKSRASTKGPSVFPLAPSSKSTSGGTAALGCLVKDYFPEPVTVSWNSGALTSGVHTFPAVLQSSGLYSLSSVVTVPSSSLGTQTYICNVNHKPSNTKVDKKV

SEQ ID NO: 72 - protein, 590 aa, Artificial Sequence
  TSC019 mature protein comprising : G19-4 (anti-CD3) scFv, human IgG1 SCC-P hinge, human CH2, human CH3, and human Ck(YAE)
EVQLQQSGPELVKPGASMKISCKASGYSFTGYIVNWLKQSHGKNLEWIGLINPYKGLTTYNQKFKGKATLTVDKSSSTAYMELLSLTSEDSAVYYCARSGYYGDSDWYFDVWGAGTTVTVSSGGGGSGGGGSGGGGSAQDIQMTQTTSSLSASLGDRVTISCRASQDIRNYLNWYQQKPDGTVKLLIYYTSRLHSGVPSRFSGSGSGTDYSLTIANLQPEDIATYFCQQGNTLPWTFGGGTKLVTKRSSEPKSSDKTHTCPPCPSGAPELLGGPSVFLFPPKPKDTLMISRTPEVTCVVVDVSHEDPEVKFNWYVDGVEVHNAKTKPREEQYNSTYRVVSVLTVLHQDWLNGKEYKCKVSNKALPAPIEKTISKAKGQPREPQVYTLPPSRDELTKNQVSLTCLVKGFYPSDIAVEWESNGQPENNYKTTPPVLDSDGSFFLYSKLTVDKSRWQQGNVFSCSVMHEALHNHYTQKSLSLSPGKSRTVAAPSVFIFPPSDEQLKSGTASVVCLLNYFYPREAKVQWKVDNALQSGNSQESATEQDSKDSTYSLSSELTLSKADYEKHKVYACEVTHQGLSSPVTKSFNRGE

SEQ ID NO: 73 - DNA, 2292 bp, Artificial Sequence
  4C04 (anti-RON) x G19-4 (anti-CD3) Scorpion DNA sequence (SO266)
atggaagcaccagcgcagcttctcttcctcctgctactctggctcccagataccaccggtgacattcagatgacccagtctcctgcctcccagtctgcatctctgggagaaagtgtcaccatcacatgcctggcaagtcagaccattggtacatggttagcatggtatcagcagaaaccagggaaatctcctcagctcctgatttatgctgcaaccagcttggcagatggggtcccatcaaggttcagtgctagtggatctggcacaaaattttctttcaagatcgacagcctacagtctgaagattttgtaagttattactgtcaacaactttacaatactccgtggacgttcggtggaggcaccaagctggaaatcaaaggtggcggtggctctggcggaggtggatccggtggcggcggctctcagatccagctgcagcagtctggacctgagctggtgaagcctgggacttcagtgaagatatcctgcaaggcttctgactacacactcactgacttctatatgaactgggtgaggcagaagcctggacagggacttgagtggattgggaggatttatcctggaaccgataaaactagatacaatgagaaattcagggacaaggccatactgaccgtggacacgtcctccagcacagcctacatgcagctcagcagcctgacatcagaggacactgctgtctatttctgtgcaagatccgcctactatggtaactacgttgctatggactactggggtcaaggaacctcagtcaccgtctcctcgagcgagcccaaatcttctgacaaaactcacacatgcccaccgtgcccagcacctgaactcctgggtggaccgtcagtcttcctcttccccccaaaacccaaggacaccctcatgatctcccggacccctgaggtcacatgcgtggtggtggacgtgagccacgaagaccctgaggtcaagttcaactggtacgtggacggcgtggaggtgcataatgccaagacaaagccgcgggaggagcagtacaacagcacgtaccgtgtggtcagcgtcctcaccgtcctgcaccaggactggctgaatggcaaggagtacaagtgcaaggtctccaacaaagccctcccagcccccatcgagaaaaccatctccaaagccaaagggcagccccgagaaccacaggtgtacaccctgcccccatcccgggatgagctgaccaagaaccaggtcagcctgacctgcctggtcaaaggcttctatccaagcgacatcgccgtggagtgggagagcaatgggcagccggagaacaactacaagaccacgcctcccgtgctggactccgacggctccttcttcctctacagcaagctcaccgtggacaagagcaggtggcagcaggggaacgtcttctcatgctccgtgatgcatgaggctctgcacaaccactacacgcagaagagcctctccctgtctccgggtcagaggcacaacaattcttccctgaatacaggaactcagatggcaggtcattctccgaattctgaggtccagctgcaacagtctggacctgaactggtgaagcctggagcttcaatgaagatttcctgcaaggcctctggttactcattcactggctacatcgtgaactggctgaagcagagccatggaaagaaccttgagtggattggacttattaatccatacaaaggtcttactacctacaaccagaaattcaagggcaaggccacattaactgtagacaagtcatccagcacagcctacatggagctcctcagtctgacatctgaagactctgcagtctattactgtgcaagatctgggtactatggtgactcggactggtacttcgatgtctggggcgcagggaccacggtcaccgtctcaagcggtggcggagggtctgggggtggcggatccggaggtggtggctctgcacaagacatccagatgacacagactacatcctccctgtctgcctctctgggagacagagtcaccatcagttgcagggcaagtcaggacattcgcaattatttaaactggtatcagcagaaaccagatggaactgttaaactcctgatctactacacatcaagattacactcaggagtcccatcaaggttcagtggcagtgggtctggaacagattattctctcaccattgccaacctgcaaccagaagatattgccacttacttttgccaacagggtaatacgcttccgtggacgttcggtggaggcaccaaactggtaaccaaacgataa

SEQ ID NO: 74 - protein, 743 aa, Artificial Sequence
  4C04 (anti-RON) x G19-4 (anti-CD3) Scorpion mature protein sequence (SO266)
DIQMTQSPASQSASLGESVTITCLASQTIGTWLAWYQQKPGKSPQLLIYAATSLADGVPSRFSASGSGTKFSFKIDSLQSEDFVSYYCQQLYNTPWTFGGGTKLEIKGGGGSGGGGSGGGGSQIQLQQSGPELVKPGTSVKISCKASDYTLTDFYMNWVRQKPGQGLEWIGRIYPGTDKTRYNEKFRDKAILTVDTSSSTAYMQLSSLTSEDTAVYFCARSAYYGNYVAMDYWGQGTSVTVSSSEPKSSDKTHTCPPCPAPELLGGPSVFLFPPKPKDTLMISRTPEVTCVVVDVSHEDPEVKFNWYVDGVEVHNAKTKPREEQYNSTYRVVSVLTVLHQDWLNGKEYKCKVSNKALPAPIEKTISKAKGQPREPQVYTLPPSRDELTKNQVSLTCLVKGFYPSDIAVEWESNGQPENNYKTTPPVLDSDGSFFLYSKLTVDKSRWQQGNVFSCSVMHEALHNHYTQKSLSLSPGQRHNNSSLNTGTQMAGHSPNSEVQLQQSGPELVKPGASMKISCKASGYSFTGYIVNWLKQSHGKNLEWIGLINPYKGLTTYNQKFKGKATLTVDKSSSTAYMELLSLTSEDSAVYYCARSGYYGDSDWYFDVWGAGTTVTVSSGGGGSGGGGSGGGGSAQDIQMTQTTSSLSASLGDRVTISCRASQDIRNYLNWYQQKPDGTVKLLIYYTSRLHSGVPSRFSGSGSGTDYSLTIANLQPEDIATYFCQQGNTLPWTFGGGTKLVTKR

SEQ ID NO: 75-76 - skipped (2 entries)

SEQ ID NO: 77 - protein, 510 aa, Artificial Sequence
  Mutated M0039
  SIGNAL (1)...(22)
MDFQVQIFSFLLISASVIMSRGVQVQLKESGPGLVAPSQSLSITCTVSGFSLTGYGVNWVRQPPGKGLEWLGMIWGDGSTDYNSALKSRLSITKDNSKSQVFLKMNSLQTDDTARYYCARDGYSNFHYYVMDYWGQGTSVTVSSGGGGSGGGGSGGGGSGGGGSDIVLTQSPASLAVSLGQRATISCRASESVEYYVTSLMQWYQQKPGQPPKLLISAASNVESGVPARFSGSGSGTDFSLNIHPVEEDDIAMYFCQQSRKVPWTFGGGTKLEIKRDQEPKSSDKTHTSPPSPAPELLGGPSVFLFPPKPKDTLMISRTPEVTCVVVDVSHEDPEVKFNWYVDGVEVHNAKTKPREEQYNSTYRVVSVLTVLHQDWLNGKEYKCKVSNKALPAPIEKTISKAKGQPREPQVYTLPPSRDELTKNQVSLTCLVKGFYPSDIAVEWESNGQPENNYKTTPPVLDSDGSFFLYSKLTVDKSRWQQGNVFSCSVMHEALHNHYTQKSLSLSPGK

SEQ ID NO: 78 - protein, 20 aa, Artificial Sequence
  H68 linker (scorpion linker derived from NKG2D)
NSLFNQEVQIPLTESYSPNS

SEQ ID NO: 79 - DNA, 366 bp, Artificial Sequence
  VH of A2
gaagttcaattgttagagtctggtggcggtcttgttcagcctggtggttctttacgtctttcttgcgctgcttccggattcactttctctttttaccagatgcattgggttcgccaagctcctggtaaaggtttggagtgggtttctggtatctatccttctggtggctatactaagtatgctgactccgttaaaggtcgcttcactatctctagagacaactctaagaatactctctacttgcagatgaacagcttaagggctgaggacactgcagtctactattgtgcgagagatctagggtacggcagtagctggtactactttgactactggggccagggaaccctggtcaccgtctcaagc

SEQ ID NO: 80 - protein, 122 aa, Artificial Sequence
  VH of A2
EVQLLESGGGLVQPGGSLRLSCAASGFTFSFYQMHWVRQAPGKGLEWVSGIYPSGGYTKYADSVKGRFTISRDNSKNTLYLQMNSLRAEDTAVYYCARDLGYGSSWYYFDYWGQGTLVTVSS

SEQ ID NO: 81-82 - skipped (2 entries)

SEQ ID NO: 83 - DNA, 330 bp, Artificial Sequence
  VL of A2
cagagcgctttgactcagcctgcctccgtgtctgggtctcctggacagtcgatcaccatctcctgcagtggaaccgacagtgacgttggtggttataaccatgtctcctggtaccaacaacacccaggcaaggcccccaaactcataatttatgatgtcgatcatcggccctcagggatctctaaccgtttctctggctccaagtctggcaacacggcctccctgaccatctctgggctccaggctgaggacgaggctgattattactgcagctcatatagaagcggtagcacttatgtcttcggaactgggaccaaggtcaccgtccta

SEQ ID NO: 84 - protein, 110 aa, Artificial Sequence
  VL of A2
QSALTQPASVSGSPGQSITISCSGTDSDVGGYNHVSWYQQHPGKAPKLIIYDVDHRPSGISNRFSGSKSGNTASLTISGLQAEDEADYYCSSYRSGSTYVFGTGTKVTVL

SEQ ID NO: 85 - DNA, 741 bp, Artificial Sequence
  A2 scFv
gaagttcaattgttagagtctggtggcggtcttgttcagcctggtggttctttacgtctttcttgcgctgcttccggattcactttctctttttaccagatgcattgggttcgccaagctcctggtaaaggtttggagtgggtttctggtatctatccttctggtggctatactaagtatgctgactccgttaaaggtcgcttcactatctctagagacaactctaagaatactctctacttgcagatgaacagcttaagggctgaggacactgcagtctactattgtgcgagagatctagggtacggcagtagctggtactactttgactactggggccagggaaccctggtcaccgtctcaagcggtggcggcggttcggggggtggcggaagtggaggtggagggagtcagagcgctttgactcagcctgcctccgtgtctgggtctcctggacagtcgatcaccatctcctgcagtggaaccgacagtgacgttggtggttataaccatgtctcctggtaccaacaacacccaggcaaggcccccaaactcataatttatgatgtcgatcatcggccctcagggatctctaaccgtttctctggctccaagtctggcaacacggcctccctgaccatctctgggctccaggctgaggacgaggctgattattactgcagctcatatagaagcggtagcacttatgtcttcggaactgggaccaaggtcaccgtccta

SEQ ID NO: 86 - protein, 247 aa, Artificial Sequence
  A2 scFv
EVQLLESGGGLVQPGGSLRLSCAASGFTFSFYQMHWVRQAPGKGLEWVSGIYPSGGYTKYADSVKGRFTISRDNSKNTLYLQMNSLRAEDTAVYYCARDLGYGSSWYYFDYWGQGTLVTVSSGGGGSGGGGSGGGGSQSALTQPASVSGSPGQSITISCSGTDSDVGGYNHVSWYQQHPGKAPKLIIYDVDHRPSGISNRFSGSKSGNTASLTISGLQAEDEADYYCSSYRSGSTYVFGTGTKVTVL

SEQ ID NO: 87 - DNA, 603 bp, Artificial Sequence
  PLD ECD
ttattcacagtgacagtccctaaggaactgtacataatagagcatggcagcaatgtgaccctggaatgcaactttgacactggaagtcatgtgaaccttggagcaataacagccagtttgcaaaaggtggaaaatgatacatccccacaccgtgaaagagccactttgctggaggagcagctgcccttagggaaggcctcgttccacatacctcaagtccaagtgagggacgaaggacagtaccaatgcataatcatctatggggtcgcctgggactacaagtacctgactctgaaagtcaaagcttcctacaggaaaataaacactcacatcctaaaggttccagaaacagatgaggtagagctcacctgccaggctacaggttatcctctggcagaagtatcctggccaaacgtcagcgttcctgccaacaccagccactccaggacccctgaaggcctctaccaggtcaccagtgttctgcgcctaaagccaccccctggcagaaacttcagctgtgtgttctggaatactcacgtgagggaacttactttggccagcattgaccttcaaagtcagatggaacccaggacccatccaacc

SEQ ID NO: 88 - protein, 201 aa, Artificial Sequence
  PLD ECD
LFTVTVPKELYIIEHGSNVTLECNFDTGSHVNLGAITASLQKVENDTSPHRERATLLEEQLPLGKASFHIPQVQVRDEGQYQCIIIYGVAWDYKYLTLKVKASYRKINTHILKVPETDEVELTCQATGYPLAEVSWPNVSVPANTSHSRTPEGLYQVTSVLRLKPPPGRNFSCVFWNTHVRELTLASIDLQSQMEPRTHPT

SEQ ID NO: 89 - DNA, 498 bp, Artificial Sequence
  monoIL10
agcccaggccagggcacccagtctgagaacagctgcacccacttcccaggcaacctgcctaacatgcttcgagatctccgagatgccttcagcagagtgaagactttctttcaaatgaaggatcagctggacaacttgttgttaaaggagtccttgctggaggactttaagggttacctgggttgccaagccttgtctgagatgatccagttttacctggaggaggtgatgccccaagctgagaaccaagacccagacatcaaggcgcatgtgaactccctgggggagaacctgaagaccctcaggctgaggctacggcgctgtcatcgatttcttccctgtgaaaacggtggtggatccggcggtaagagcaaggccgtggagcaggtgaagaatgcctttaataagctccaagagaaaggcatctacaaagccatgagtgagtttgacatcttcatcaactacatagaagcctacattacaatgaagatacgaaac

SEQ ID NO: 90 - protein, 166 aa, Artificial Sequence
  monoIL10
SPGQGTQSENSCTHFPGNLPNMLRDLRDAFSRVKTFFQMKDQLDNLLLKESLLEDFKGYLGCQALSEMIQFYLEEVMPQAENQDPDIKAHVNSLGENLKTLRLRLRRCHRFLPCENGGGSGGKSKAVEQVKNAFNKLQEKGIYKAMSEFDIFINYIEAYITMKIRN

SEQ ID NO: 91 - DNA, 348 bp, Artificial Sequence
  VH of 3D1
caggtccagctgcagcagtctgggcctgagctggtgaggcctggggaatcagtgaagatttcctgcaagggttccggctacacattcactgattatgctatacagtgggtgaagcagagtcatgcaaagagtctagagtggattggagttattaatatttactatgataatacaaactacaaccagaagtttaagggcaaggccacaatgactgtagacaaatcctccagcacagcctatatggaacttgccagattgacatctgaggattctgccatctattactgtgcaagagcggcctggtatatggactactggggtcaaggaacctcagtcaccgtctcctca

SEQ ID NO: 92 - protein, 116 aa, Artificial Sequence
  VH of 3D1
QVQLQQSGPELVRPGESVKISCKGSGYTFTDYAIQWVKQSHAKSLEWIGVINIYYDNTNYNQKFKGKATMTVDKSSSTAYMELARLTSEDSAIYYCARAAWYMDYWGQGTSVTVSS

SEQ ID NO: 93-94 - skipped (2 entries)

SEQ ID NO: 95 - DNA, 336 bp, Artificial Sequence
  VL of 3D1
gacattgtgctgtcacagtctccatcctccctggctgtgtcagcaggagagaaggtcactatgagctgcaaatccagtcagagtctgctcaacagtagaacccgagagaactacttggcttggtaccagcagaaaccagggcagtctcctaaactgctgatctactgggcatccactagggaatctggggtccctgatcgcttcacaggcagtggatctgggacagatttcactctcaccatcagcagtgtgcaggctgaagacctggcagtttattactgcacgcaatcttataatctttacacgttcggaggggggaccaagctggaaataaaa

SEQ ID NO: 96 - protein, 112 aa, Artificial Sequence
  VL of 3D1
DIVLSQSPSSLAVSAGEKVTMSCKSSQSLLNSRTRENYLAWYQQKPGQSPKLLIYWASTRESGVPDRFTGSGSGTDFTLTISSVQAEDLAVYYCTQSYNLYTFGGGTKLEIK

SEQ ID NO: 97 - DNA, 744 bp, Artificial Sequence
  3D1 scFv
caggtccagctgcagcagtctgggcctgagctggtgaggcctggggaatcagtgaagatttcctgcaagggttccggctacacattcactgattatgctatacagtgggtgaagcagagtcatgcaaagagtctagagtggattggagttattaatatttactatgataatacaaactacaaccagaagtttaagggcaaggccacaatgactgtagacaaatcctccagcacagcctatatggaacttgccagattgacatctgaggattctgccatctattactgtgcaagagcggcctggtatatggactactggggtcaaggaacctcagtcaccgtctcctcagggggtggaggctctggtggcggtggctctggcggaggtggatccggtggcggcggatctgacattgtgctgtcacagtctccatcctccctggctgtgtcagcaggagagaaggtcactatgagctgcaaatccagtcagagtctgctcaacagtagaacccgagagaactacttggcttggtaccagcagaaaccagggcagtctcctaaactgctgatctactgggcatccactagggaatctggggtccctgatcgcttcacaggcagtggatctgggacagatttcactctcaccatcagcagtgtgcaggctgaagacctggcagtttattactgcacgcaatcttataatctttacacgttcggaggggggaccaagctggaaataaaa

SEQ ID NO: 98 - protein, 248 aa, Artificial Sequence
  3D1 scFv
QVQLQQSGPELVRPGESVKISCKGSGYTFTDYAIQWVKQSHAKSLEWIGVINIYYDNTNYNQKFKGKATMTVDKSSSTAYMELARLTSEDSAIYYCARAAWYMDYWGQGTSVTVSSGGGGSGGGGSGGGGSGGGGSDIVLSQSPSSLAVSAGEKVTMSCKSSQSLLNSRTRENYLAWYQQKPGQSPKLLIYWASTRESGVPDRFTGSGSGTDFTLTISSVQAEDLAVYYCTQSYNLYTFGGGTKLEIK

SEQ ID NO: 99 - protein, 247 aa, Artificial Sequence
  MET021 scFv
DIQMTQSPSSLSASVGDRVTITCRASQSIRNYLNWYQQEPGKAPKLLIYAASSLQSGVPSRFSGSGSGTDFILTISSLQPEDFATYYCQQSYVTPLTFGGGTKVEIKGGGGSGGGGSGGGGSGGGGSEVQLLESGGGLVQPGGSLRLSCAASGFTFSKYDMLWVRQAPGKGLEWVSYIYPSGGLTEYADSVKGRFTISRDNSKNTLYLQMNSLRAEDTAVYYCARRAPRSLSFDIWGQGTMVTVSSS

SEQ ID NO: 100 - protein, 120 aa, Artificial Sequence
  VH of MET021 scFv
EVQLLESGGGLVQPGGSLRLSCAASGFTFSKYDMLWVRQAPGKGLEWVSYIYPSGGLTEYADSVKGRFTISRDNSKNTLYLQMNSLRAEDTAVYYCARRAPRSLSFDIWGQGTMVTVSSS

SEQ ID NO: 101 - protein, 107 aa, Artificial Sequence
  VL of MET021 scFv
DIQMTQSPSSLSASVGDRVTITCRASQSIRNYLNWYQQEPGKAPKLLIYAASSLQSGVPSRFSGSGSGTDFILTISSLQPEDFATYYCQQSYVTPLTFGGGTKVEIK

SEQ ID NO: 102 - protein, 249 aa, Artificial Sequence
  G19-4 scFv
EVQLQQSGPELVKPGASMKISCKASGYSFTGYIVNWLKQSHGKNLEWIGLINPYKGLTTYNQKFKGKATLTVDKSSSTAYMELLSLTSEDSAVYYCARSGYYGDSDWYFDVWGAGTTVTVSSGGGGSGGGGSGGGGSAQDIQMTQTTSSLSASLGDRVTISCRASQDIRNYLNWYQQKPDGTVKLLIYYTSRLHSGVPSRFSGSGSGTDYSLTIANLQPEDIATYFCQQGNTLPWTFGGGTKLVTKRSS

SEQ ID NO: 103 - protein, 122 aa, Artificial Sequence
  VH of G19-4
EVQLQQSGPELVKPGASMKISCKASGYSFTGYIVNWLKQSHGKNLEWIGLINPYKGLTTYNQKFKGKATLTVDKSSSTAYMELLSLTSEDSAVYYCARSGYYGDSDWYFDVWGAGTTVTVSS

SEQ ID NO: 104 - protein, 112 aa, Artificial Sequence
  VL of G19-4
AQDIQMTQTTSSLSASLGDRVTISCRASQDIRNYLNWYQQKPDGTVKLLIYYTSRLHSGVPSRFSGSGSGTDYSLTIANLQPEDIATYFCQQGNTLPWTFGGGTKLVTKRSS

SEQ ID NO: 105 - protein, 252 aa, Artificial Sequence
  HD37 scFv
DIVLTQSPASLAVSLGQRATISCKASQSVDYDGDSYLNWYQQIPGQPPKLLIYDASNLVSGIPPRFSGSGSGTDFTLNIHPVEKVDAATYHCQQSTEDPWTFGGGTKLEIKGGGGSGGGGSGGGGASQVQLQQSGAELVRPGSSVKISCKASGYAFSSYWMNWVKQRPGQGLEWIGQIWPGDGDTNYNGKFKGKATLTADESSSTAYMQLSSLASEDSAVYFCARRETTTVGRYYYAMDYWGQGTSVTVSSS

SEQ ID NO: 106 - protein, 121 aa, Artificial Sequence
  VH of 2E12 scFv
QVQLKESGPGSVAPSQSLSITCTVSGFSLTGYGVNWVRQPPGKGLEWLGMIWGDGSTDYNSALKSRLSITKDNSKSQVFLKMNSLQTDDTARYYCARDGYSNFHYYVMDYWGQGTSVTVSS

SEQ ID NO: 107 - protein, 111 aa, Artificial Sequence
  VL of 2E12 scFv
DIVLTQSPASLAVSLGQRATISCRASESVEYYVTSLMQWYQQKPGQPPKLLISAASNVESGVPARFSGSGSGTDFSLNIHPVEEDDIAMYFCQQSRKVPWTFGGGTKLEIK

SEQ ID NO: 108 - protein, 20 aa, Artificial Sequence
  Linker of 2E12 scFv
GGGGSGGGGSGGGGSGGGGS

SEQ ID NO: 109 - protein, 252 aa, Artificial Sequence
  full length 2E12 scFv
QVQLKESGPGSVAPSQSLSITCTVSGFSLTGYGVNWVRQPPGKGLEWLGMIWGDGSTDYNSALKSRLSITKDNSKSQVFLKMNSLQTDDTARYYCARDGYSNFHYYVMDYWGQGTSVTVSSGGGGSGGGGSGGGGSGGGGSDIVLTQSPASLAVSLGQRATISCRASESVEYYVTSLMQWYQQKPGQPPKLLISAASNVESGVPARFSGSGSGTDFSLNIHPVEEDDIAMYFCQQSRKVPWTFGGGTKLEIK

SEQ ID NO: 110 - protein, 22 aa, Artificial Sequence
  Signal peptide of 2E12 scFv
MDFQVQIFSFLLISASVIMSRG

SEQ ID NO: 111 - protein, 20 aa, Artificial Sequence
  Signal peptide in various signle chain fusion proteins (X01xx)
MEAPAQLLFLLLLWLPDTTG

SEQ ID NO: 112 - protein, 107 aa, Homo sapiens [sequence omitted]

SEQ ID NO: 113 - protein, 106 aa, Homo sapiens
GQPKANPTVTLFPPSSEELQANKATLVCLISDFYPGAVTVAWKADGSPVKAGVETTKPSKQSNNKYAASSYLSLTPEQWKSHRSYSCQVTHEGSTVEKTVAPTECS

SEQ ID NO: 114 - protein, 98 aa, Homo sapiens
ASTKGPSVFPLAPSSKSTSGGTAALGCLVKDYFPEPVTVSWNSGALTSGVHTFPAVLQSSGLYSLSSVVTVPSSSLGTQTYICNVNHKPSNTKVDKKV

SEQ ID NO: 115 - protein, 110 aa, Homo sapiens
APELLGGPSVFLFPPKPKDTLMISRTPEVTCVVVDVSHEDPEVKFNWYVDGVEVHNAKTKPREEQYNSTYRVVSVLTVLHQDWLNGKEYKCKVSNKALPAPIEKTISKAK

SEQ ID NO: 116 - protein, 107 aa, Homo sapiens
GQPREPQVYTLPPSRDELTKNQVSLTCLVKGFYPSDIAVEWESNGQPENNYKTTPPVLDSDGSFFLYSKLTVDKSRWQQGNVFSCSVMHEALHNHYTQKSLSLSPGK

SEQ ID NO: 117 - protein, 125 aa, Artificial Sequence
  VH of HD37
QVQLQQSGAELVRPGSSVKISCKASGYAFSSYWMNWVKQRPGQGLEWIGQIWPGDGDTNYNGKFKGKATLTADESSSTAYMQLSSLASEDSAVYFCARRETTTVGRYYYAMDYWGQGTSVTVSSS

SEQ ID NO: 118 - skipped

SEQ ID NO: 119 - protein, 111 aa, Artificial Sequence
  VL of HD37
DIVLTQSPASLAVSLGQRATISCKASQSVDYDGDSYLNWYQQIPGQPPKLLIYDASNLVSGIPPRFSGSGSGTDFTLNIHPVEKVDAATYHCQQSTEDPWTFGGGTKLEIK

SEQ ID NO: 120 - protein, 249 aa, Artificial Sequence
  M0042 scFv (VL-VH)
DIQMTQSPSTLSASVGDRVTITCRASQSISSWLAWYQQKPGKAPKLLVYSVSSLQSGVPSRFSGSGSGTDFTLTINSLQPEDFATYYCQQSYSTPFTFGPGTKVDIKGGGGSGGGGSGGGGSGGGGSEVQLLESGGGLVQPGGSLRLSCAASGFTFSHYYMSWVRQAPGKGLEWVSYIGPSGGFTAYADSVKGRFTISRDNSKNTLYLQMNSLRAEDTAVYYCARDGWVGSENYSGMDVWGQGTTVSSS

SEQ ID NO: 121 - protein, 122 aa, Artificial Sequence
  VH of M0042
EVQLLESGGGLVQPGGSLRLSCAASGFTFSHYYMSWVRQAPGKGLEWVSYIGPSGGFTAYADSVKGRFTISRDNSKNTLYLQMNSLRAEDTAVYYCARDGWVGSENYSGMDVWGQGTTVSSS

SEQ ID NO: 122 - protein, 107 aa, Artificial Sequence
  VL of M0042
DIQMTQSPSTLSASVGDRVTITCRASQSISSWLAWYQQKPGKAPKLLVYSVSSLQSGVPSRFSGSGSGTDFTLTINSLQPEDFATYYCQQSYSTPFTFGPGTKVDIK

SEQ ID NO: 123-124 - skipped (2 entries)

SEQ ID NO: 125 - protein, 20 aa, Artificial Sequence
  NKG2D Linker
NSLFNQEVQIPLTESYSPNS

SEQ ID NO: 126-139 - skipped (14 entries)

SEQ ID NO: 140 - protein, 105 aa, Artificial Sequence
  Altered human Cl sequence used in constructing Interceptors
QPKANPTVTLFPPSSEELQANKATLVCLISDFYPGAVTVAWKADGSPVKAGVETTKPSKQSNNKYAASSYLSLTPEQWKSHRSYSCQVTHEGSTVEKTVAPTESS

SEQ ID NO: 141 - protein, 105 aa, Artificial Sequence
  Altered human Ck sequence used in constructing Interceptors
TVAAPSVFIFPPSDEQLKSGTASVVCLLNNFYPREAKVQWKVDNALQSGNSQESVTEQDSKDSTYSLSSTLTLSKADYEKHKVYACEVTHQGLSSPVTKSFNRGE

SEQ ID NO: 142 - protein, 105 aa, Artificial Sequence
  Altered human Ck with N29A substitution
TVAAPSVFIFPPSDEQLKSGTASVVCLLANFYPREAKVQWKVDNALQSGNSQESVTEQDSKDSTYSLSSTLTLSKADYEKHKVYACEVTHQGLSSPVTKSFNRGE

SEQ ID NO: 143 - protein, 105 aa, Artificial Sequence
  Altered human Ck with N30A substitution
TVAAPSVFIFPPSDEQLKSGTASVVCLLNAFYPREAKVQWKVDNALQSGNSQESVTEQDSKDSTYSLSSTLTLSKADYEKHKVYACEVTHQGLSSPVTKSFNRGE

SEQ ID NO: 144 - protein, 105 aa, Artificial Sequence
  Altered human Ck with Q52A substitution
TVAAPSVFIFPPSDEQLKSGTASVVCLLNNFYPREAKVQWKVDNALQSGNSAESVTEQDSKDSTYSLSSTLTLSKADYEKHKVYACEVTHQGLSSPVTKSFNRGE

SEQ ID NO: 145 - protein, 105 aa, Artificial Sequence
  Altered human Ck with V55A substitution
TVAAPSVFIFPPSDEQLKSGTASVVCLLNNFYPREAKVQWKVDNALQSGNSQESATEQDSKDSTYSLSSTLTLSKADYEKHKVYACEVTHQGLSSPVTKSFNRGE

SEQ ID NO: 146 - protein, 105 aa, Artificial Sequence
  Altered human Ck with T56A substitution
TVAAPSVFIFPPSDEQLKSGTASVVCLLNNFYPREAKVQWKVDNALQSGNSQESVAEQDSKDSTYSLSSTLTLSKADYEKHKVYACEVTHQGLSSPVTKSFNRGE

SEQ ID NO: 147 - protein, 105 aa, Artificial Sequence
  Altered human Ck with S68A substitution
TVAAPSVFIFPPSDEQLKSGTASVVCLLNNFYPREAKVQWKVDNALQSGNSQESVTEQDSKDSTYSLASTLTLSKADYEKHKVYACEVTHQGLSSPVTKSFNRGE

SEQ ID NO: 148 - protein, 105 aa, Artificial Sequence
  Altered human Ck with T70A substitution
TVAAPSVFIFPPSDEQLKSGTASVVCLLNNFYPREAKVQWKVDNALQSGNSQESVTEQDSKDSTYSLSSALTLSKADYEKHKVYACEVTHQGLSSPVTKSFNRGE

SEQ ID NO: 149 - protein, 105 aa, Artificial Sequence
  Altered human Ck with V55A N29A substitution
TVAAPSVFIFPPSDEQLKSGTASVVCLLANFYPREAKVQWKVDNALQSGNSQESATEQDSKDSTYSLSSTLTLSKADYEKHKVYACEVTHQGLSSPVTKSFNRGE

SEQ ID NO: 150 - protein, 105 aa, Artificial Sequence
  Altered human Ck with V55A N30A substitution
TVAAPSVFIFPPSDEQLKSGTASVVCLLNAFYPREAKVQWKVDNALQSGNSQESATEQDSKDSTYSLSSTLTLSKADYEKHKVYACEVTHQGLSSPVTKSFNRGE

SEQ ID NO: 151 - protein, 105 aa, Artificial Sequence
  Altered human Ck with V55A Q52A substitution
TVAAPSVFIFPPSDEQLKSGTASVVCLLNNFYPREAKVQWKVDNALQSGNSAESATEQDSKDSTYSLSSTLTLSKADYEKHKVYACEVTHQGLSSPVTKSFNRGE

SEQ ID NO: 152 - protein, 105 aa, Artificial Sequence
  Altered human Ck with V55A S68A substitution
TVAAPSVFIFPPSDEQLKSGTASVVCLLNNFYPREAKVQWKVDNALQSGNSQESATEQDSKDSTYSLASTLTLSKADYEKHKVYACEVTHQGLSSPVTKSFNRGE

SEQ ID NO: 153 - protein, 105 aa, Artificial Sequence
  Altered human Ck with V55A T70A substitution
TVAAPSVFIFPPSDEQLKSGTASVVCLLNNFYPREAKVQWKVDNALQSGNSQESATEQDSKDSTYSLSSALTLSKADYEKHKVYACEVTHQGLSSPVTKSFNRGE

SEQ ID NO: 154 - protein, 105 aa, Artificial Sequence
  Altered human Ck with V55A N29A N30A substitution
TVAAPSVFIFPPSDEQLKSGTASVVCLLAAFYPREAKVQWKVDNALQSGNSQESATEQDSKDSTYSLSSTLTLSKADYEKHKVYACEVTHQGLSSPVTKSFNRGE

SEQ ID NO: 155 - protein, 105 aa, Artificial Sequence
  Altered human Ck with V55A N29A S68A substitution
TVAAPSVFIFPPSDEQLKSGTASVVCLLANFYPREAKVQWKVDNALQSGNSQESATEQDSKDSTYSLASTLTLSKADYEKHKVYACEVTHQGLSSPVTKSFNRGE

SEQ ID NO: 156 - protein, 105 aa, Artificial Sequence
  Altered human Ck with V55A S68A T70A substitution
TVAAPSVFIFPPSDEQLKSGTASVVCLLNNFYPREAKVQWKVDNALQSGNSQESATEQDSKDSTYSLASALTLSKADYEKHKVYACEVTHQGLSSPVTKSFNRGE

SEQ ID NO: 157 - protein, 105 aa, Artificial Sequence
  Altered human Ck with V55A Q52A S68A substitution
TVAAPSVFIFPPSDEQLKSGTASVVCLLNNFYPREAKVQWKVDNALQSGNSAESATEQDSKDSTYSLASTLTLSKADYEKHKVYACEVTHQGLSSPVTKSFNRGE

SEQ ID NO: 158 - protein, 105 aa, Artificial Sequence
  Altered human Ck with N29R V55A T70A substitution
TVAAPSVFIFPPSDEQLKSGTASVVCLLRNFYPREAKVQWKVDNALQSGNSQESATEQDSKDSTYSLSSALTLSKADYEKHKVYACEVTHQGLSSPVTKSFNRGE

SEQ ID NO: 159 - protein, 105 aa, Artificial Sequence
  Altered human Ck with N29AK V55A T70A substitution
TVAAPSVFIFPPSDEQLKSGTASVVCLLKNFYPREAKVQWKVDNALQSGNSQESATEQDSKDSTYSLSSALTLSKADYEKHKVYACEVTHQGLSSPVTKSFNRGE

SEQ ID NO: 160 - protein, 105 aa, Artificial Sequence
  Altered human Ck with N29W V55A T70A substitution
TVAAPSVFIFPPSDEQLKSGTASVVCLLWNFYPREAKVQWKVDNALQSGNSQESATEQDSKDSTYSLSSALTLSKADYEKHKVYACEVTHQGLSSPVTKSFNRGE

SEQ ID NO: 161 - protein, 105 aa, Artificial Sequence
  Altered human Ck with N29Y V55A T70A substitution
TVAAPSVFIFPPSDEQLKSGTASVVCLLYNFYPREAKVQWKVDNALQSGNSQESATEQDSKDSTYSLSSALTLSKADYEKHKVYACEVTHQGLSSPVTKSFNRGE

SEQ ID NO: 162 - protein, 105 aa, Artificial Sequence
  Altered human Ck with S68K V55A substitution
TVAAPSVFIFPPSDEQLKSGTASVVCLLNNFYPREAKVQWKVDNALQSGNSQESATEQDSKDSTYSLKSTLTLSKADYEKHKVYACEVTHQGLSSPVTKSFNRGE

SEQ ID NO: 163 - protein, 105 aa, Artificial Sequence
  Altered human Ck with S68E V55A substitution
TVAAPSVFIFPPSDEQLKSGTASVVCLLNNFYPREAKVQWKVDNALQSGNSQESATEQDSKDSTYSLESTLTLSKADYEKHKVYACEVTHQGLSSPVTKSFNRGE

SEQ ID NO: 164 - protein, 105 aa, Artificial Sequence
  Altered human Ck with S68Q V55A substitution
TVAAPSVFIFPPSDEQLKSGTASVVCLLNNFYPREAKVQWKVDNALQSGNSQESATEQDSKDSTYSLQSTLTLSKADYEKHKVYACEVTHQGLSSPVTKSFNRGE

SEQ ID NO: 165 - protein, 105 aa, Artificial Sequence
  Altered human Ck with T70E V55A substitution
TVAAPSVFIFPPSDEQLKSGTASVVCLLNNFYPREAKVQWKVDNALQSGNSQESATEQDSKDSTYSLSSELTLSKADYEKHKVYACEVTHQGLSSPVTKSFNRGE

SEQ ID NO: 166 - protein, 105 aa, Artificial Sequence
  Altered human Ck with Q52L N29A N30A substitution
TVAAPSVFIFPPSDEQLKSGTASVVCLLAAFYPREAKVQWKVDNALQSGNSLESVTEQDSKDSTYSLSSTLTLSKADYEKHKVYACEVTHQGLSSPVTKSFNRGE

SEQ ID NO: 167 - protein, 105 aa, Artificial Sequence
  Altered human Ck with N30R V55A T70A substitution
TVAAPSVFIFPPSDEQLKSGTASVVCLLNRFYPREAKVQWKVDNALQSGNSQESATEQDSKDSTYSLSSALTLSKADYEKHKVYACEVTHQGLSSPVTKSFNRGE

SEQ ID NO: 168 - protein, 105 aa, Artificial Sequence
  Altered human Ck with N30K V55A T70A substitution
TVAAPSVFIFPPSDEQLKSGTASVVCLLNKFYPREAKVQWKVDNALQSGNSQESATEQDSKDSTYSLSSALTLSKADYEKHKVYACEVTHQGLSSPVTKSFNRGE

SEQ ID NO: 169 - protein, 105 aa, Artificial Sequence
  Altered human Ck with N30W V55A T70A substitution
TVAAPSVFIFPPSDEQLKSGTASVVCLLNWFYPREAKVQWKVDNALQSGNSQESATEQDSKDSTYSLSSALTLSKADYEKHKVYACEVTHQGLSSPVTKSFNRGE

SEQ ID NO: 170 - protein, 105 aa, Artificial Sequence
  Altered human Ck with N30E V55A T70A substitution
TVAAPSVFIFPPSDEQLKSGTASVVCLLNEFYPREAKVQWKVDNALQSGNSQESATEQDSKDSTYSLSSALTLSKADYEKHKVYACEVTHQGLSSPVTKSFNRGE

SEQ ID NO: 171 - protein, 105 aa, Artificial Sequence
  Altered human Ck with N30G V55A T70A substitution
TVAAPSVFIFPPSDEQLKSGTASVVCLLNGFYPREAKVQWKVDNALQSGNSQESATEQDSKDSTYSLSSALTLSKADYEKHKVYACEVTHQGLSSPVTKSFNRGE

SEQ ID NO: 172 - protein, 105 aa, Artificial Sequence
  Altered human Ck with V55R N29A N30A substitution
TVAAPSVFIFPPSDEQLKSGTASVVCLLAAFYPREAKVQWKVDNALQSGNSQESRTEQDSKDSTYSLSSTLTLSKADYEKHKVYACEVTHQGLSSPVTKSFNRGE

SEQ ID NO: 173 - protein, 105 aa, Artificial Sequence
  Altered human Ck with V55W N29A N30A substitution
TVAAPSVFIFPPSDEQLKSGTASVVCLLAAFYPREAKVQWKVDNALQSGNSQESWTEQDSKDSTYSLSSTLTLSKADYEKHKVYACEVTHQGLSSPVTKSFNRGE

SEQ ID NO: 174 - protein, 105 aa, Artificial Sequence
  Altered human Ck with V55E N29A N30A substitution
TVAAPSVFIFPPSDEQLKSGTASVVCLLAAFYPREAKVQWKVDNALQSGNSQESETEQDSKDSTYSLSSTLTLSKADYEKHKVYACEVTHQGLSSPVTKSFNRGE

SEQ ID NO: 175 - protein, 105 aa, Artificial Sequence
  Altered human Ck with N29W N30Y V55A T70E (WYAE) substitution
TVAAPSVFIFPPSDEQLKSGTASVVCLLWYFYPREAKVQWKVDNALQSGNSQESATEQDSKDSTYSLSSELTLSKADYEKHKVYACEVTHQGLSSPVTKSFNRGE

SEQ ID NO: 176 - protein, 105 aa, Artificial Sequence
  Altered human Ck with N29Y N30Y V55A T70E (YYAE) substitution
TVAAPSVFIFPPSDEQLKSGTASVVCLLYYFYPREAKVQWKVDNALQSGNSQESATEQDSKDSTYSLSSELTLSKADYEKHKVYACEVTHQGLSSPVTKSFNRGE

SEQ ID NO: 177 - protein, 105 aa, Artificial Sequence
  Altered human Ck with N30E V55A T70E (EAE) substitution
TVAAPSVFIFPPSDEQLKSGTASVVCLLNEFYPREAKVQWKVDNALQSGNSQESATEQDSKDSTYSLSSELTLSKADYEKHKVYACEVTHQGLSSPVTKSFNRGE

SEQ ID NO: 178 - protein, 105 aa, Artificial Sequence
  Altered human Ck with N30Y V55A T70E (YAE) substitution
TVAAPSVFIFPPSDEQLKSGTASVVCLLNYFYPREAKVQWKVDNALQSGNSQESATEQDSKDSTYSLSSELTLSKADYEKHKVYACEVTHQGLSSPVTKSFNRGE

SEQ ID NO: 179-180 - skipped (2 entries)

SEQ ID NO: 181 - protein, 4 aa, Artificial Sequence
  Portion of human IgG1 hinge
CPPC

SEQ ID NO: 182 - protein, 112 aa, Artificial Sequence
  VL of P2C2 scFv
DIVMIQDELSNPVSSGESVSISCRSSKSLLDKEGKTYLNWFLQRPGQSPQLLIYLMSMRESGVSDRFSGSGSGTDFTLEISRVKAEDVGVYYCQQLVEYPWTFGGGTKLEIK

SEQ ID NO: 183 - protein, 15 aa, Artificial Sequence
  Linker of P2C2 scFv
GGGGSGGGGSGGGGS

SEQ ID NO: 184 - protein, 112 aa, Artificial Sequence
  VH of P2C2 scFv
QIQLVQSGPELKKPGETVKISCKASGYTFTDFSMHWVRQAPGKGLKWMGWINTETGEPTYADDFRGRFAFSLETSASTAYLQINNLKNEDTATYFCTWSAYWGQGTLVTVSA

SEQ ID NO: 185 - protein, 239 aa, Artificial Sequence
  full length of P2C2 scFv
DIVMIQDELSNPVSSGESVSISCRSSKSLLDKEGKTYLNWFLQRPGQSPQLLIYLMSMRESGVSDRFSGSGSGTDFTLEISRVKAEDVGVYYCQQLVEYPWTFGGGTKLEIKGGGGSGGGGSGGGGSQIQLVQSGPELKKPGETVKISCKASGYTFTDFSMHWVRQAPGKGLKWMGWINTETGEPTYADDFRGRFAFSLETSASTAYLQINNLKNEDTATYFCTWSAYWGQGTLVTVSA

SEQ ID NO: 186 - protein, 102 aa, Homo sapiens
ASPTSPKVFPLSLCSTQPDGNVVIACLVQGFFPQEPLSVTWSESGQGVTARNFPPSQDASGDLYTTSSQLTLPATQCLAGKSVTCHVKHYTNPSQDVTVPCP

SEQ ID NO: 187 - protein, 102 aa, Homo sapiens
ASPTSPKVFPLSLDSTPQDGNVVVACLVQGFFPQEPLSVTWSESGQNVTARNFPPSQDASGDLYTTSSQLTLPATQCPDGKSVTCHVKHYTNPSQDVTVPCP

SEQ ID NO: 188 - protein, 101 aa, Homo sapiens
APTKAPDVFPIISGCRHPKDNSPVVLACLITGYHPTSVTVTWYMGTQSQPQRTFPEIQRRDSYYMTSSQLSTPLQQWRQGEYKCVVQHTASKSKKEIFRWP

SEQ ID NO: 189 - protein, 103 aa, Homo sapiens
ASTQSPSVFPLTRCCKNIPSNATSVTLGCLATGYFPEPVMVTCDTGSLNGTTMTLPATTLTLSGHYATISLLTVSGAWAKQMFTCRVAHTPSSTDWVDNKTFS

SEQ ID NO: 190 - protein, 98 aa, Homo sapiens
ASTKGPSVFPLAPCSRSTSESTAALGCLVKDYFPEPVTVSWNSGALTSGVHTFPAVLQSSGLYSLSSVVTVPSSNFGTQTYTCNVDHKPSNTKVDKTV

SEQ ID NO: 191 - protein, 98 aa, Homo sapiens
ASTKGPSVFPLAPCSRSTSGGTAALGCLVKDYFPEPVTVSWNSGALTSGVHTFPAVLQSSGLYSLSSVVTVPSSSLGTQTYTCNVNHKPSNTKVDKRV

SEQ ID NO: 192 - protein, 98 aa, Homo sapiens
ASTKGPSVFPLAPCSRSTSESTAALGCLVKDYFPEPVTVSWNSGALTSGVHTFPAVLQSSGLYSLSSVVTVPSSSLGTKTYTCNVDHKPSNTKVDKRV

SEQ ID NO: 193 - skipped

SEQ ID NO: 194 - protein, 104 aa, Homo sapiens
GSASAPTLFPLVSCENSPSDTSSVAVGCLAQDFLPDSITLSWKYKNNSDISSTRGFPSVLRGGKYAATSQVLLPSKDVMQGTDEHVVCKVQHPNGNKEKNVPLP

SEQ ID NO: 195 - protein, 101 aa, Homo sapiens
CCHPRLSLHRPALEDLLLGSEANLTCTLTGLRDASGVTFTWTPSSGKSAVQGPPERDLCGCYSVSSVLPGCAEPWNHGKTFTCTAAYPESKTPLTATLSKS

SEQ ID NO: 196 - protein, 101 aa, Homo sapiens
CCHPRLSLHRPALEDLLLGSEANLTCTLTGLRDASGATFTWTPSSGKSAVQGPPERDLCGCYSVSSVLPGCAQPWNHGETFTCTAAHPELKTPLTANITKS

SEQ ID NO: 197 - protein, 108 aa, Homo sapiens
ECPSHTQPLGVYLLTPAVQDLWLRDKATFTCFVVGSDLKDAHLTWEVAGKVPTGGVEEGLLERHSNGSQSQHSRLTLPRSLWNAGTSVTCTLNHPSLPPQRLMALREP

SEQ ID NO: 198 - protein, 107 aa, Homo sapiens
VCSRDFTPPTVKILQSSCDGGGHFPPTIQLLCLVSGYTPGTINITWLEDGQVMDVDLSTASTTQEGELASTQSELTLSQKHWLSDRTYTCQVTYQGHTFEDSTKKCA

SEQ ID NO: 199 - protein, 109 aa, Homo sapiens
APPVAGPSVFLFPPKPKDTLMISRTPEVTCVVVDVSHEDPEVQFNWYVDGVEVHNAKTKPREEQFNSTFRVVSVLTVVHQDWLNGKEYKCKVSNKGLPAPIEKTISKTK

SEQ ID NO: 200 - protein, 110 aa, Homo sapiens
APELLGGPSVFLFPPKPKDTLMISRTPEVTCVVVDVSHEDPEVQFKWYVDGVEVHNAKTKPREEQYNSTFRVVSVLTVLHQDWLNGKEYKCKVSNKALPAPIEKTISKTK

SEQ ID NO: 201 - protein, 110 aa, Homo sapiens
APEFLGGPSVFLFPPKPKDTLMISRTPEVTCVVVDVSQEDPEVQFNWYVDGVEVHNAKTKPREEQFNSTYRVVSVLTVLHQDWLNGKEYKCKVSNKGLPSSIEKTISKAK

SEQ ID NO: 202 - protein, 105 aa, Artificial Sequence
  Altered human Ck region + T70E, N29A, N30A, V55A
TVAAPSVFIFPPSDEQLKSGTASVVCLLAAFYPREAKVQWKVDNALQSGNSQESATEQDSKDSTYSLSSELTLSKADYEKHKVYACEVTHQGLSSPVTKSFNRGE

SEQ ID NO: 203 - protein, 112 aa, Homo sapiens
VIAELPPKVSVFVPPRDGFFGNPRKSKLICQATGFSPRQIQVSWLREGKQVGSGVTTDQVQAEAKESGPTTYKVTSTLTIKESDWLGQSMFTCRVDHRGLTFQQNASSMCVP

SEQ ID NO: 204 - protein, 131 aa, Homo sapiens
GNTFRPEVHLLPPPSEELALNELVTLTCLARGFSPKDVLVRWLQGSQELPREKYLTWASRQEPSQGTTTFAVTSILRVAAEDWKKGDTFSCMVGHEALPLAFTQKTIDRLAGKPTHVNVSVVMAEVDGTCY

SEQ ID NO: 205 - protein, 131 aa, Homo sapiens; identical to SEQ ID NO: 204

SEQ ID NO: 206 - protein, 117 aa, Homo sapiens
AAQAPVKLSLNLLASSDPPEAASWLLCEVSGFSPPNILLMWLEDQREVNTSGFAPARPPPQPRSTTFWAWSVLRVPAPPSPQPATYTCVVSHEDSRTLLNASRSLEVSYVTDHGPMK

SEQ ID NO: 207 - protein, 108 aa, Homo sapiens
DSNPRGVSAYLSRPSPFDLFIRKSPTITCLVVDLAPSKGTVNLTWSRASGKPVNHSTRKEEKQRNGTLTVTSTLPVGTRDWIEGETYQCRVTHPHLPRALMRSTTKTS

SEQ ID NO: 208 - protein, 107 aa, Homo sapiens
GQPREPQVYTLPPSREEMTKNQVSLTCLVKGFYPSDIAVEWESNGQPENNYKTTPPMLDSDGSFFLYSKLTVDKSRWQQGNVFSCSVMHEALHNHYTQKSLSLSPGK

SEQ ID NO: 209 - protein, 107 aa, Homo sapiens
GQPREPQVYTLPPSREEMTKNQVSLTCLVKGFYPSDIAVEWESSGQPENNYNTTPPMLDSDGSFFLYSKLTVDKSRWQQGNIFSCSVMHEALHNRFTQKSLSLSPGK

SEQ ID NO: 210 - protein, 107 aa, Homo sapiens
GQPREPQVYTLPPSQEEMTKNQVSLTCLVKGFYPSDIAVEWESNGQPENNYKTTPPVLDSDGSFFLYSRLTVDKSRWQEGNVFSCSVMHEALHNHYTQKSLSLSLGK

SEQ ID NO: 211 - protein, 7 aa, Homo sapiens
ERKCCVE

SEQ ID NO: 212 - protein, 106 aa, Homo sapiens
DQDTAIRVFAIPPSFASIFLTKSTKLTCLVTDLTTYDSVTISWTRQNGEAVKTHTNISESHPNATFSAVGEASICEDDWNSGERFTCTVTHTDLPSPLKQTISRPK

SEQ ID NO: 213 - protein, 110 aa, Homo sapiens
GPRAAPEVYAFATPEWPGSRDKRTLACLIQNFMPEDISVQWLHNEVQLPDARHSTTQPRKTKGSGFFVFSRLEVTRAEWEQKDEFICRAVHEAASPSQTVQRAVSVNPGK

SEQ ID NO: 214 - protein, 131 aa, Homo sapiens
GVALHRPDVYLLPPAREQLNLRESATITCLVTGFSPADVFVQWMQRGQPLSPEKYVTSAPMPEPQAPGRYFAHSILTVSEEEWNTGETYTCVVAHEALPNRVTERTVDKSTGKPTLYNVSLVMSDTAGTCY

SEQ ID NO: 215 - protein, 19 aa, Homo sapiens
VPSTPPTPSPSTPPTPSPS

SEQ ID NO: 216 - protein, 6 aa, Homo sapiens
VPPPPP

SEQ ID NO: 217 - protein, 58 aa, Homo sapiens
ESPKAQASSVPTAQPQAEGSLAKATTAPATTRNTGRGGEEKKKEKEKEEQEERETKTP

SEQ ID NO: 218 - skipped

SEQ ID NO: 219 - protein, 12 aa, Homo sapiens
ERKCCVECPPCP

SEQ ID NO: 220 - protein, 62 aa, Homo sapiens
ELKTPLGDTTHTCPRCPEPKSCDTPPPCPRCPEPKSCDTPPPCPRCPEPKSCDTPPPCPRCP

SEQ ID NO: 221 - protein, 12 aa, Homo sapiens
ESKYGPPCPSCP

SEQ ID NO: 222 - protein, 34 aa, Homo sapiens
ESPKAQASSVPTAQPQAEGSLAKATTAPATTRNT

SEQ ID NO: 223 - protein, 106 aa, Homo sapiens
GQPKAAPSVTLFPPSSEELQANKATLVCLISDFYPGAVTVAWKADSSPVKAGVETTTPSKQSNNKYAASSYLSLTPEQWKSHRSYSCQVTHEGSTVEKTVAPTECS

SEQ ID NO: 224 - protein, 106 aa, Homo sapiens
GQPKAAPSVTLFPPSSEELQANKATLVCLISDFYPGAVTVAWKADSSPVKAGVETTTPSKQSNNKYAASSYLSLTPEQWKSHKSYSCQVTHEGSTVEKTVAPTECS

SEQ ID NO: 225 - protein, 106 aa, Homo sapiens
GQPKAAPSVTLFPPSSEELQANKATLVCLISDFYPGAVKVAWKADGSPVNTGVETTTPSKQSNNKYAASSYLSLTPEQWKSHRSYSCQVTHEGSTVEKTVAPAECS

SEQ ID NO: 226 - protein, 106 aa, Homo sapiens
GQPKAAPSVTLFPPSSEELQANKATLVCLVSDFYPGAVTVAWKADGSPVKVGVETTKPSKQSNNKYAASSYLSLTPEQWKSHRSYSCRVTHEGSTVEKTVAPAECS

SEQ ID NO: 227 - protein, 10 aa, Homo sapiens
EPKSCDKTHT

SEQ ID NO: 228 - protein, 5 aa, Homo sapiens
CPPCP

SEQ ID NO: 229-231 - skipped (3 entries)

SEQ ID NO: 232 - protein, 15 aa, Artificial Sequence
  Altered human IgG1 hinge (CSC-P)
EPKSCDKTHTSPPCP

SEQ ID NO: 233 - skipped

SEQ ID NO: 234 - protein, 15 aa, Artificial Sequence
  Altered human IgG1 hinge (CCS-P)
EPKSCDKTHTCPPSP

SEQ ID NO: 235-239 - skipped (5 entries)

SEQ ID NO: 240 - protein, 15 aa, Artificial Sequence
  Altered human IgG1 hinge (CCS-S)
EPKSCDKTHTCPPSS

SEQ ID NO: 241 - protein, 12 aa, Artificial Sequence
  Stalk  region of CD69
QYNCPGQYTFSM

SEQ ID NO: 242 - protein, 11 aa, Artificial Sequence
  Stalk  region of CD72
PFFTCGSADTC

SEQ ID NO: 243 - protein, 18 aa, Artificial Sequence
  Stalk  region of CD94
EPAFTPGPNIELQKDSDC

SEQ ID NO: 244 - protein, 18 aa, Artificial Sequence
  Stalk  region of NKG2A
QRHNNSSLNTRTQKARHC

SEQ ID NO: 245 - protein, 12 aa, Homo sapiens
ELKTPLGDTTHT

SEQ ID NO: 246 - protein, 10 aa, Homo sapiens
EPKSCDTPPP

SEQ ID NO: 247 - protein, 7 aa, Homo sapiens
ESKYGPP

SEQ ID NO: 248 - protein, 5 aa, Homo sapiens
CPRCP

SEQ ID NO: 249 - protein, 5 aa, Homo sapiens
CPSCP

SEQ ID NO: 250 - protein, 17 aa, Homo sapiens
ELKTPLGDTTHTCPRCP

SEQ ID NO: 251 - protein, 15 aa, Homo sapiens
EPKSCDTPPPCPRCP

SEQ ID NO: 252 - protein, 24 aa, Homo sapiens
GRGGEEKKKEKEKEEQEERETKTP

SEQ ID NO: 253 - protein, 107 aa, Homo sapiens
VCSRDFTPPTVKILQSSSDGGGHFPPTIQLLCLVSGYTPGTINITWLEDGQVMDVDLSTASTTQEGELASTQSELTLSQKHWLSDRTYTCQVTYQGHTFEDSTKKCA

SEQ ID NO: 254 - protein, 112 aa, Homo sapiens; identical to SEQ ID NO: 203

SEQ ID NO: 255 - protein, 107 aa, Artificial Sequence
  Altered human CH2 upper hinge like sequence of IgE
VCSRDFTPPTVKILQSSSDGGGHFPPTIQLLCLVSGYTPGTINITWLEDGQVMDVDLSTASTTQEGELASTQSELTLSQKHWLSDRTYTCQVTYQGHTFEDSTKKSA

SEQ ID NO: 256 - protein, 268 aa, Artificial Sequence
  5D5 scFv (VLVH)
  SIGNAL (10)...(20)
MEAPAQLLFLLLLWLPDTTGDFMMSQSPSSLTVSVGEKVTVSCKSSQSLLYTSSQKNYLAWYQQKPGQSPKLLIYWASTRESGVPDRFTGSGSGTDFTLTITSVKADDLAVYYCQQYYAYPWTFGGGTKLELKGGGGSGGGGSGGGGSQVQLQQSGPELVRPGASVKMSCRASGYTFTSYWLHWVKQRPGQGLEWIGMIDPSNSDTRFNPNFKDKATLNVDRSSNTAYMLLSSLTSADSAVYYCATYGSYVSPLDYWGQGTSVTVSSS

SEQ ID NO: 257 - protein, 248 aa, Artificial Sequence
  5D5 scFv (VLVH) mature protein without the signal peptide
DFMMSQSPSSLTVSVGEKVTVSCKSSQSLLYTSSQKNYLAWYQQKPGQSPKLLIYWASTRESGVPDRFTGSGSGTDFTLTITSVKADDLAVYYCQQYYAYPWTFGGGTKLELKGGGGSGGGGSGGGGSQVQLQQSGPELVRPGASVKMSCRASGYTFTSYWLHWVKQRPGQGLEWIGMIDPSNSDTRFNPNFKDKATLNVDRSSNTAYMLLSSLTSADSAVYYCATYGSYVSPLDYWGQGTSVTVSSS

SEQ ID NO: 258 - protein, 120 aa, Artificial Sequence
  5D5 VH
QVQLQQSGPELVRPGASVKMSCRASGYTFTSYWLHWVKQRPGQGLEWIGMIDPSNSDTRFNPNFKDKATLNVDRSSNTAYMLLSSLTSADSAVYYCATYGSYVSPLDYWGQGTSVTVSSS

SEQ ID NO: 259 - protein, 113 aa, Artificial Sequence
  5D5 VL
DFMMSQSPSSLTVSVGEKVTVSCKSSQSLLYTSSQKNYLAWYQQKPGQSPKLLIYWASTRESGVPDRFTGSGSGTDFTLTITSVKADDLAVYYCQQYYAYPWTFGGGTKLELK

SEQ ID NO: 260 - DNA, 792 bp, Artificial Sequence
  4C04 anti-Ron scFv with signal peptide and junction amino acids SSS at carboxy-terminus
atggaagcaccagcgcagcttctcttcctcctgctactctggctcccagataccaccggtgacattcagatgacccagtctcctgcctcccagtctgcatctctgggagaaagtgtcaccatcacatgcctggcaagtcagaccattggtacatggttagcatggtatcagcagaaaccagggaaatctcctcagctcctgatttatgctgcaaccagcttggcagatggggtcccatcaaggttcagtgctagtggatctggcacaaaattttctttcaagatcgacagcctacagtctgaagattttgtaagttattactgtcaacaactttacaatactccgtggacgttcggtggaggcaccaagctggaaatcaaaggtggcggtggctctggcggaggtggatccggtggcggcggctctcagatccagctgcagcagtctggacctgagctggtgaagcctgggacttcagtgaagatatcctgcaaggcttctgactacacactcactgacttctatatgaactgggtgaggcagaagcctggacagggacttgagtggattgggaggatttatcctggaaccgataaaactagatacaatgagaaattcagggacaaggccatactgaccgtggacacgtcctccagcacagcctacatgcagctcagcagcctgacatcagaggacactgctgtctatttctgtgcaagatccgcctactatggtaactacgttgctatggactactggggtcaaggaacctcagtcaccgtctcctcgagc

SEQ ID NO: 261 - protein, 244 aa, Artificial Sequence
  4C04 anti-Ron scFv with signal peptide and junction amino acids SSS at carboxy-terminus
DIQMTQSPASQSASLGESVTITCLASQTIGTWLAWYQQKPGKSPQLLIYAATSLADGVPSRFSASGSGTKFSFKIDSLQSEDFVSYYCQQLYNTPWTFGGGTKLEIKGGGGSGGGGSGGGGSQIQLQQSGPELVKPGTSVKISCKASDYTLTDFYMNWVRQKPGQGLEWIGRIYPGTDKTRYNEKFRDKAILTVDTSSSTAYMQLSSLTSEDTAVYFCARSAYYGNYVAMDYWGQGTSVTVSSS

SEQ ID NO: 262 - DNA, 2115 bp, Artificial Sequence
  4C04 anti-Ron single chain polypeptide (4C04 scFv-CH1-CH2-CH3-Ck with signal peptide)
atggaagcaccagcgcagcttctcttcctcctgctactctggctcccagataccaccggtgacattcagatgacccagtctcctgcctcccagtctgcatctctgggagaaagtgtcaccatcacatgcctggcaagtcagaccattggtacatggttagcatggtatcagcagaaaccagggaaatctcctcagctcctgatttatgctgcaaccagcttggcagatggggtcccatcaaggttcagtgctagtggatctggcacaaaattttctttcaagatcgacagcctacagtctgaagattttgtaagttattactgtcaacaactttacaatactccgtggacgttcggtggaggcaccaagctggaaatcaaaggtggcggtggctctggcggaggtggatccggtggcggcggctctcagatccagctgcagcagtctggacctgagctggtgaagcctgggacttcagtgaagatatcctgcaaggcttctgactacacactcactgacttctatatgaactgggtgaggcagaagcctggacagggacttgagtggattgggaggatttatcctggaaccgataaaactagatacaatgagaaattcagggacaaggccatactgaccgtggacacgtcctccagcacagcctacatgcagctcagcagcctgacatcagaggacactgctgtctatttctgtgcaagatccgcctactatggtaactacgttgctatggactactggggtcaaggaacctcagtcaccgtctcctcgagcgcctccaccaagggcccatcggtcttccccctggcaccctcctccaagagcacctctgggggcacagcggccctgggctgcctggtcaaggactacttccccgagccggtgacggtgtcgtggaactcaggcgccctgaccagcggcgtgcacaccttcccggctgtcctacagtcctcaggactctactccctcagcagcgtggtgaccgtgccctccagcagcttgggcacccagacctacatctgcaacgtgaatcacaagcccagcaacaccaaggtggacaagaaagttcgtacggagcccaaatcttctgacaaaactcacacatgcccaccgtgcccatccggagcacctgaactcctgggtggaccgtcagtcttcctcttccccccaaaacccaaggacaccctcatgatctcccggacccctgaggtcacatgcgtggtggtggacgtgagccacgaagaccctgaggtcaagttcaactggtacgtggacggcgtggaggtgcataatgccaagacaaagccgcgggaggagcagtacaacagcacgtaccgtgtggtcagcgtcctcaccgtcctgcaccaggactggctgaatggcaaggagtacaagtgcaaggtctccaacaaagccctcccagcccccatcgagaaaaccatctccaaagccaaagggcagccccgagaaccacaggtgtacaccctgcccccatcccgggatgagctgaccaagaaccaggtcagcctgacctgcctggtcaaaggcttctatccaagcgacatcgccgtggagtgggagagcaatgggcagccggagaacaactacaagaccacgcctcccgtgctggactccgacggctccttcttcctctacagcaagctcaccgtggacaagagcaggtggcagcaggggaacgtcttctcatgctccgtgatgcatgaggctctgcacaaccactacacgcagaagagcctctccctgtctccgggtaaatctagaactgtggctgcaccatctgtcttcatcttcccgccatctgatgagcagttgaaatctggaactgcctctgttgtgtgcctgctgaataacttctatcccagagaggccaaagtacagtggaaggtggataacgccctccaatcgggtaactcccaggagagtgtcacagagcaggacagcaaggacagcacctacagcctcagcagcaccctgacgctgagcaaagcagactacgagaaacacaaagtctacgcctgcgaagtcacccatcagggcctgagctcgcccgtcacaaagagcttcaacaggggagag

SEQ ID NO: 263-264 - skipped (2 entries)

SEQ ID NO: 265 - protein, 240 aa, Artificial Sequence
  11H09 anti-RON scFv mature protein without the signal peptide but with junction amino acids SSS at carboxy-terminus
DIQMTQSPSSLSASLGERVSLTCRASQDIGSSLSWLQQEPDGTIKRLIYSTSSLDSGVPKRFSGSRSGSDYSLTISSLESEDFVDYYCLQYASSPWTFGGGTKLEIKGGGGSGGGGSGGGGSQVQLQQSGAELAKPGASVKMSCKSSGYTFTSYWIHWVKERPGQGLEWIGYIYPTTGYTESNQKFKDKATLTADKSSSTAYMQLSSLTSEDSAVYYCFLLRPWYFDVWGAGTTVTVSSS

SEQ ID NO: 266-295 - skipped (30 entries)

SEQ ID NO: 296 - protein, 11 aa, Artificial Sequence
  Anti-c-Met Light Chain Complementarity Determining Region
RASQSIRNYLN

SEQ ID NO: 297 - protein, 7 aa, Artificial Sequence
  Anti-c-Met Light Chain Complementarity Determining Region
AASSLQS

SEQ ID NO: 298 - protein, 9 aa, Artificial Sequence
  Anti-c-Met Light Chain Complementarity Determining Region
QQSYVTPLT

SEQ ID NO: 299-300 - skipped (2 entries)

SEQ ID NO: 301 - protein, 119 aa, Artificial Sequence
  OKT3 VH amino acid sequence
QVQLQQSGAELARPGASVKMSCKASGYTFTRYTMHWVKQRPGQGLEWIGYINPSRGYTNYNQKFKDKATLTTDKSSSTAYMQLSSLTSEDSAVYYCARYYDDHYCLDYWGQGTTVTVSS

SEQ ID NO: 302 - protein, 106 aa, Artificial Sequence [sequence omitted]

SEQ ID NO: 303 - protein, 123 aa, Artificial Sequence
  BC3 VH amino acid sequence
QVQLQQSAAELARPGASVKMSCKASGYTFTRYTMQWVKQRPGQGLEWIGYINPSSGYIGYSQKFKDKTTLTADKSSSTAYMQLSSLTSEDSAVYYCARSKVYYDYDVYSMDYWGQGTSVTVSS

SEQ ID NO: 304 - protein, 106 aa, Artificial Sequence
  BC3 VL amino acid sequence
QIILTQSPAIMSASPGEKVTMTCSASSSVSYMHWYQQKSGTSPKRWIYDTSKLASGVPARFSGSGSGTSYSLTISSMEAEDAATYYCQQWSSNPLTFGAGTKLELK

SEQ ID NO: 305 - protein, 217 aa, Artificial Sequence
  G1 N297A  CH2-CH3 (N297ST - A297ST)
APELLGGPSVFLFPPKPKDTLMISRTPEVTCVVVDVSHEDPEVKFNWYVDGVEVHNAKTKPREEQYASTYRVVSVLTVLHQDWLNGKEYKCKVSNKALPAPIEKTISKAKGQPREPQVYTLPPSRDELTKNQVSLTCLVKGFYPSDIAVEWESNGQPENNYKTTPPVLDSDGSFFLYSKLTVDKSRWQQGNVFSCSVMHEALHNHYTQKSLSLSPGK

SEQ ID NO: 306 - protein, 216 aa, Artificial Sequence
  IgG1 AA N297A CH2CH3 (Ala substitutions at 234, 235, 237 and 297; 236 deleted)
APEAAAPSVFLFPPKPKDTLMISRTPEVTCVVVDVSHEDPEVKFNWYVDGVEVHNAKTKPREEQYASTYRVVSVLTVLHQDWLNGKEYKCKVSNKALPAPIEKTISKAKGQPREPQVYTLPPSRDELTKNQVSLTCLVKGFYPSDIAVEWESNGQPENNYKTTPPVLDSDGSFFLYSKLTVDKSRWQQGNVFSCSVMHEALHNHYTQKSLSLSPGK

SEQ ID NO: 307 - protein, 216 aa, Artificial Sequence
  G2 AA N297A CH2CH3 (Ala substitution at 234, 236 and 297)
APEAAAPSVFLFPPKPKDTLMISRTPEVTCVVVDVSHEDPEVQFNWYVDGMEVHNAKTKPREEQFASTFRVVSVLTVVHQDWLNGKEYKCKVSNKGLPAPIEKTISKTKGQPREPQVYTLPPSREEMTKNQVSLTCLVKGFYPSDIAVEWESNGQPENNYKTTPPMLDSDGSFFLYSKLTVDKSRWQQGNVFSCSVMHEALHNHYTQKSLSLSPGK

SEQ ID NO: 308 - protein, 216 aa, Artificial Sequence
  G4 AA N297A CH2CH3 (Ala substitutions at 234, 235, 237 and 297; 236 deleted)
APEAAAPSVFLFPPKPKDTLMISRTPEVTCVVVDVSQEDPEVQFNWYVDGVEVHNAKTKPREEQFASTYRVVSVLTVLHQDWLNGKEYKCKVSNKGLPSSIEKTISKAKGQPREPQVYTLPPSQEEMTKNQVSLTCLVKGFYPSDIAVEWESNGQPENNYKTTPPVLDSDGSFFLYSRLTVDKSRWQEGNVFSCSVMHEALHNHYTQKSLSLSPGK

SEQ ID NO: 309 - protein, 153 aa, Artificial Sequence
  DeltaCH2 (g1CH3 only)
GQPREPQVYTLPPSRDELTKNQVSLTCLVKGFYPSDIAVEWESNGQPENNYKTTPPVLDSDGSFFLYSKLTVDKSRWQQGNVFSCSVMHEALHNHYTQKSLSLSPGKTGLNDIFEAQKIEWHEDYKDDDDKDYKDDDDKDYKDDDDKHHHHHH

SEQ ID NO: 310 - protein, 246 aa, Artificial Sequence
  BC3-VH-VL amino acid sequence (includes g4s linker)
QVQLQQSAAELARPGASVKMSCKASGYTFTRYTMQWVKQRPGQGLEWIGYINPSSGYIGYSQKFKDKTTLTADKSSSTAYMQLSSLTSEDSAVYYCARSKVYYDYDVYSMDYWGQGTSVTVSSGGGGSGGGGSGGGGSAQQIILTQSPAIMSASPGEKVTMTCSASSSVSYMHWYQQKSGTSPKRWIYDTSKLASGVPARFSGSGSGTSYSLTISSMEAEDAATYYCQQWSSNPLTFGAGTKLELK

SEQ ID NO: 311 - protein, 242 aa, Artificial Sequence
  OKT3-VH-VL amino acid sequence (includes g4s linker)
QVQLQQSGAELARPGASVKMSCKASGYTFTRYTMHWVKQRPGQGLEWIGYINPSRGYTNYNQKFKDKATLTTDKSSSTAYMQLSSLTSEDSAVYYCARYYDDHYCLDYWGQGTTVTVSSGGGGSGGGGSGGGGSAQQIVLTQSPAIMSASPGEKVTMTCSASSSVSYMNWYQQKSGTSPKRWIYDTSKLASGVPAHFRGSGSGTSYSLTISGMEAEDAATYYCQQWSSNPFTFGSGTKLEIN

SEQ ID NO: 312 - protein, 244 aa, Artificial Sequence
  H57 VH-Linker-VL (without leader)
EVYLVESGGDLVQPGSSLKVSCAASGFTFSDFWMYWVRQAPGKGLEWVGRIKNKPNNYATEYADSVRGRFTISRDDSRNSIYLQMNRLRVDDTAIYYCTRAGRFDHFDYWGQGTMVTVSSGGGGSGGGGSGGGGSAQYELIQPSSASVTVGETVKITCSGDQLPKNFAYWFQQKSDKNILLLIYMDNKRPSGIPERFSGSTSGTTATLTISGAQPEDEAAYYCLSSYGDNNDLVFGSGTQLTVL

SEQ ID NO: 313 - protein, 120 aa, Artificial Sequence
  H57 Null2 SMIP - VH amino acid
EVYLVESGGDLVQPGSSLKVSCAASGFTFSDFWMYWVRQAPGKGLEWVGRIKNKPNNYATEYADSVRGRFTISRDDSRNSIYLQMNRLRVDDTAIYYCTRAGRFDHFDYWGQGTMVTVSS

SEQ ID NO: 314 - protein, 110 aa, Artificial Sequence
  Mouse IGHG2c mutated CH2 (alanine substitutions at positions L234, L235, G237, E318, K320 and K322)
APDAAGAPSVFIFPPKIKDVLMISLSPMVTCVVVDVSEDDPDVQISWFVNNVEVHTAQTQTHREDYNSTLRVVSALPIQHQDWMSGKAFACAVNNRALPSPIEKTISKPR

SEQ ID NO: 315 - protein, 107 aa, Artificial Sequence
  H57 Null2 SMIP - VL amino acid sequence
YELIQPSSASVTVGETVKITCSGDQLPKNFAYWFQQKSDKNILLLIYMDNKRPSGIPERFSGSTSGTTATLTISGAQPEDEAAYYCLSSYGDNNDLVFGSGTQLTVL

SEQ ID NO: 316 - skipped

SEQ ID NO: 317 - protein, 116 aa, Artificial Sequence
  2C11 Null2 SMIP - VH amino acid
EVQLVESGGGLVQPGKSLKLSCEASGFTFSGYGMHWVRQAPGRGLESVAYITSSSINIKYADAVKGRFTVSRDNAKNLLFLQMNILKSEDTAMYYCARFDWDKNYWGQGTMVTVSS

SEQ ID NO: 318 - protein, 107 aa, Artificial Sequence
  2C11 Null2 SMIP - VL amino acid
DIQMTQSPSSLPASLGDRVTINCQASQDISNYLNWYQQKPGKAPKLLIYYTNKLADGVPSRFSGSGSGRDSSFTISSLESEDIGSYYCQQYYNYPWTFGPGTKLEIK

SEQ ID NO: 319 - protein, 240 aa, Artificial Sequence
  2C11 VH-Linker-VL (without leader)
EVQLVESGGGLVQPGKSLKLSCEASGFTFSGYGMHWVRQAPGRGLESVAYITSSSINIKYADAVKGRFTVSRDNAKNLLFLQMNILKSEDTAMYYCARFDWDKNYWGQGTMVTVSSGGGGSGGGGSGGGGSAQDIQMTQSPSSLPASLGDRVTINCQASQDISNYLNWYQQKPGKAPKLLIYYTNKLADGVPSRFSGSGSGRDSSFTISSLESEDIGSYYCQQYYNYPWTFGPGTKLEIK

SEQ ID NO: 320 - protein, 110 aa, Mus musculus
  Human IGHG2c CH2 domain
APDLLGGPSVFIFPPKIKDVLMISLSPMVTCVVVDVSEDDPDVQISWFVNNVEVHTAQTQTHREDYNSTLRVVSALPIQHQDWMSGKEFKCKVNNRALPSPIEKTISKPR

SEQ ID NO: 321 - protein, 213 aa, Artificial Sequence
  HM1 (IgM CH3:IgG1 CH3) without C-terminal tail
DQDTAIRVFAIPPSFASIFLTKSTKLTCLVTDLTTYDSVTISWTRQNGEAVKTHTNISESHPNATFSAVGEASICEDDWNSGERFTCTVTHTDLPSPLKQTISRPKGQPREPQVYTLPPSRDELTKNQVSLTCLVKGFYPSDIAVEWESNGQPENNYKTTPPVLDSDGSFFLYSKLTVDKSRWQQGNVFSCSVMHEALHNHYTQKSLSLSPGK

SEQ ID NO: 322 - protein, 109 aa, Artificial Sequence
  IgG4 AA CH2
APEAAAPSVFLFPPKPKDTLMISRTPEVTCVVVDVSQEDPEVQFNWYVDGVEVHNAKTKPREEQFASTYRVVSVLTVLHQDWLNGKEYKCKVSNKGLPSSIEKTISKAK

SEQ ID NO: 323 - protein, 217 aa, Artificial Sequence
  Human IgG1 CH2 CH3 Null2
APEAAGAPSVFLFPPKPKDTLMISRTPEVTCVVVDVSHEDPEVKFNWYVDGVEVHNAKTKPREEQYNSTYRVVSVLTVLHQDWLNGKAYACAVSNKALPAPIEKTISKAKGQPREPQVYTLPPSRDELTKNQVSLTCLVKGFYPSDIAVEWESNGQPENNYKTTPPVLDSDGSFFLYSKLTVDKSRWQQGNVFSCSVMHEALHNHYTQKSLSLSPGK

SEQ ID NO: 324 - protein, 110 aa, Artificial Sequence
  IgG1 N297A CH2
APELLGGPSVFLFPPKPKDTLMISRTPEVTCVVVDVSHEDPEVKFNWYVDGVEVHNAKTKPREEQYASTYRVVSVLTVLHQDWLNGKEYKCKVSNKALPAPIEKTISKAK

SEQ ID NO: 325 - protein, 109 aa, Artificial Sequence
  IgG1 AA CH2
APEAAAPSVFLFPPKPKDTLMISRTPEVTCVVVDVSHEDPEVKFNWYVDGVEVHNAKTKPREEQYASTYRVVSVLTVLHQDWLNGKEYKCKVSNKALPAPIEKTISKAK

SEQ ID NO: 326 - protein, 108 aa, Artificial Sequence
  IgG2 AA CH2
APEAAAPSVFLFPPKPKDTLMISRTPEVTCVVVDVSHEDPEVQFNWYVDGMEVHNAKTKPREEQFASTFRVVSVLTVVHQDWLNGKEYKCKVSNKGLPAPIEKTISKT

SEQ ID NO: 327 - protein, 121 aa, Artificial Sequence
  Cris7-VH murine hybridoma Amino Acid
  ACT_SITE (31)...(35): complementarity-determining region
  ACT_SITE (50)...(66): complementarity-determining region
  ACT_SITE (100)...(110): complementarity-determining region
QVQLQQSGAELARPGASVKMSCKASGYTFTRSTMHWVKQRPGQGLEWIGYINPSSAYTNYNQKFKDKATLTADKSSSTAYMQLSSLTSEDSAVYYCASPQVHYDYNGFPYWGQGTLVTVSA

SEQ ID NO: 328 - protein, 107 aa, Artificial Sequence
  Cris7-VL murine hybridoma Amino Acid
  ACT_SITE (24)...(33): complementarity-determining region
  ACT_SITE (49)...(55): complementarity-determining region
  ACT_SITE (88)...(96): complementarity-determining region
QVVLTQSPAIMSAFPGEKVTMTCSASSSVSYMNWYQQKSGTSPKRWIYDSSKLASGVPARFSGSGSGTSYSLTISSMETEDAATYYCQQWSRNPPTFGGGTKLQITR

SEQ ID NO: 329 - protein, 107 aa, Artificial Sequence
  HuCris7 VL.1
  ACT_SITE (24)...(33): complementarity-determining region
  ACT_SITE (49)...(55): complementarity-determining region
  ACT_SITE (88)...(96): complementarity-determining region
DIQMTQSPSSLSASVGDRVTMTCSASSSVSYMNWYQQKPGKAPKRWIYDSSKLASGVPARFSGSGSGTDYTLTISSLQPEDFATYYCQQWSRNPPTFGGGTKLQITR

SEQ ID NO: 330 - protein, 107 aa, Artificial Sequence
  HuCris7 VL.2
DIQMTQSPSSLSASVGDRVTITCSASSSVSYMNWYQQTPGKAPKRWIYDSSKLASGVPSRFSGSGSGTDFTLTISSLQPEDIATYYCQQWSRNPPTFGQGTKLQITR

SEQ ID NO: 331 - protein, 121 aa, Artificial Sequence
  HuCris7 VH.1
  ACT_SITE (31)...(35): complementarity-determining region
  ACT_SITE (50)...(66): complementarity-determining region
  ACT_SITE (100)...(110): complementarity-determining region
QVQLVQSGAEVKKPGASVKVSCKASGYTFTRSTMHWVKQRPGQGLEWIGYINPSSAYTNYNQKFKDKATLTADKSSSTAYMQLSSLRSEDTAVYYCARPQVHYDYNGFPYWGQGTLVTVSS

SEQ ID NO: 332 - protein, 121 aa, Artificial Sequence
  HuCris7 VH.2
QVQLVQSGGGVVQPGRSLRLSCKASGYTFTRSTMHWVRQAPGKGLEWIGYINPSSAYTNYNQKFKDKATLTADKSKNTAYMELSSLRSEDTAVYYCARPQVHYDYNGFPYWGQGTLVTVSS

SEQ ID NO: 333 - protein, 121 aa, Artificial Sequence
  HuCRIS7 VH.3
QVQLVQSGGGVVQPGRSLRLSCKASGYTFTRSTMHWVRQAPGKGLEWIGYINPSSAYTNYNQKFKDRFTISADKSKSTAFLQMDSLRPEDTGVYFCARPQVHYDYNGFPYWGQGTPVTVSS

SEQ ID NO: 334 - protein, 245 aa, Artificial Sequence
  Cris7-(VH-VL)
  SITE (122)...(138): Linker
QVQLQQSGAELARPGASVKMSCKASGYTFTRSTMHWVKQRPGQGLEWIGYINPSSAYTNYNQKFKDKATLTADKSSSTAYMQLSSLTSEDSAVYYCASPQVHYDYNGFPYWGQGTLVTVSAGGGGSGGGGSGGGGSAQQVVLTQSPAIMSAFPGEKVTMTCSASSSVSYMNWYQQKSGTSPKRWIYDSSKLASGVPARFSGSGSGTSYSLTISSMETEDAATYYCQQWSRNPPTFGGGTKLQITR

SEQ ID NO: 335 - protein, 245 aa, Artificial Sequence
  HuCris7-(VH1-VL1)
  SITE (122)...(138): Linker
QVQLVQSGAEVKKPGASVKVSCKASGYTFTRSTMHWVKQAPGQGLEWIGYINPSSAYTNYNQKFKDKATLTADKSSSTAYMQLSSLRSEDTAVYYCARPQVHYDYNGFPYWGQGTLVTVSSGGGGSGGGGSGGGGSAQDIQMTQSPSSLSASVGDRVTMTCSASSSVSYMNWYQQKPGKAPKRWIYDSSKLASGVPARFSGSGSGTDYTLTISSLQPEDFATYYCQQWSRNPPTFGGGTKLQITR

SEQ ID NO: 336 - protein, 245 aa, Artificial Sequence
  HuCris7-(VH1-VL2)
  SITE (122)...(138): Linker
QVQLVQSGAEVKKPGASVKVSCKASGYTFTRSTMHWVKQAPGQGLEWIGYINPSSAYTNYNQKFKDKATLTADKSSSTAYMQLSSLRSEDTAVYYCARPQVHYDYNGFPYWGQGTLVTVSSGGGGSGGGGSGGGGSAQDIQMTQSPSSLSASVGDRVTITCSASSSVSYMNWYQQTPGKAPKRWIYDSSKLASGVPSRFSGSGSGTDFTLTISSLQPEDIATYYCQQWSRNPPTFGQGTKLQITR

SEQ ID NO: 337 - protein, 245 aa, Artificial Sequence
  HuCris7-(VH2-VL1)
  SITE (122)...(138): Linker
QVQLVQSGGGVVQPGRSLRLSCKASGYTFTRSTMHWVRQAPGKGLEWIGYINPSSAYTNYNQKFKDKATLTADKSKNTAYMELSSLRSEDTAVYYCARPQVHYDYNGFPYWGQGTLVTVSSGGGGSGGGGSGGGGSAQDIQMTQSPSSLSASVGDRVTMTCSASSSVSYMNWYQQKPGKAPKRWIYDSSKLASGVPARFSGSGSGTDYTLTISSLQPEDFATYYCQQWSRNPPTFGGGTKLQITR

SEQ ID NO: 338 - protein, 245 aa, Artificial Sequence
  HuCris7-(VH2-VL2)
  SITE (122)...(138): Linker
QVQLVQSGGGVVQPGRSLRLSCKASGYTFTRSTMHWVRQAPGKGLEWIGYINPSSAYTNYNQKFKDKATLTADKSKNTAYMELSSLRSEDTAVYYCARPQVHYDYNGFPYWGQGTLVTVSSGGGGSGGGGSGGGGSAQDIQMTQSPSSLSASVGDRVTITCSASSSVSYMNWYQQTPGKAPKRWIYDSSKLASGVPSRFSGSGSGTDFTLTISSLQPEDIATYYCQQWSRNPPTFGQGTKLQITR

SEQ ID NO: 339 - protein, 245 aa, Artificial Sequence
  HuCris7-(VH3-VL1)
  SITE (122)...(138): Liniker
QVQLVQSGGGVVQPGRSLRLSCKASGYTFTRSTMHWVRQAPGKGLEWIGYINPSSAYTNYNQKFKDRFTISADKSKSTAFLQMDSLRPEDTGVYFCARPQVHYDYNGFPYWGQGTPVTVSSGGGGSGGGGSGGGGSAQDIQMTQSPSSLSASVGDRVTMTCSASSSVSYMNWYQQKPGKAPKRWIYDSSKLASGVPARFSGSGSGTDYTLTISSLQPEDFATYYCQQWSRNPPTFGGGTKLQITR

SEQ ID NO: 340 - protein, 245 aa, Artificial Sequence
  HuCris7-(VH3-VL2)
  SITE (122)...(138): Linker
QVQLVQSGGGVVQPGRSLRLSCKASGYTFTRSTMHWVRQAPGKGLEWIGYINPSSAYTNYNQKFKDRFTISADKSKSTAFLQMDSLRPEDTGVYFCARPQVHYDYNGFPYWGQGTPVTVSSGGGGSGGGGSGGGGSAQDIQMTQSPSSLSASVGDRVTITCSASSSVSYMNWYQQTPGKAPKRWIYDSSKLASGVPSRFSGSGSGTDFTLTISSLQPEDIATYYCQQWSRNPPTFGQGTKLQITR

SEQ ID NO: 341 - protein, 216 aa, Artificial Sequence
  Half null CH2-CH3 regions
PDAAGAPSVFIFPPKIKDVLMISLSPMVTCVVVDVSEDDPDVQISWFVNNVEVHTAQTQTHREDYASTLRVVSALPIQHQDWMSGKEFKCKVNNRALPSPIEKTISKPRGPVRAPQVYVLPPPAEEMTKKEFSLTCMITGFLPAEIAVDWTSNGRTEQNYKNTATVLDSDGSYFMYSKLRVQKSTWERGSLFACSVVHEGLHNHLTTKTISRSLGK

SEQ ID NO: 342 - protein, 213 aa, Artificial Sequence
  HM2 (mouse CH3mu-CH3gamma) without C-termial tail
SPSTDILTFTIPPSFADIFLSKSANLTCLVSNLATYETLNISWASQSGEPLETKIKIMESHPNGTFSAKGVASVCVEDWNNRKEFVCTVTHRDLPSPQKKFISKPNGPVRAPQVYVLPPPAEEMTKKEFSLTCMITGFLPAEIAVDWTSNGRTEQNYKNTATVLDSDGSYFMYSKLRVQKSTWERGSLFACSVVHEGLHNHLTTKTISRSLGK

SEQ ID NO: 343 - protein, 110 aa, Artificial Sequence
  huamn IgG4 AA CH2 with alanine substitutions at F234 and N297
APEALGGPSVFLFPPKPKDTLMISRTPEVTCVVVDVSQEDPEVQFNWYVDGVEVHNAKTKPREEQFNSTYRVVSVLTVLHQDWLNGKEYKCKVSNKGLPSSIEKTISKAK

SEQ ID NO: 344 - protein, 110 aa, Artificial Sequence
  human IgG4 AA CH2 with alanine substitutions at L235 and N297
APEFAGGPSVFLFPPKPKDTLMISRTPEVTCVVVDVSQEDPEVQFNWYVDGVEVHNAKTKPREEQFNSTYRVVSVLTVLHQDWLNGKEYKCKVSNKGLPSSIEKTISKAK

SEQ ID NO: 345 - protein, 110 aa, Artificial Sequence
  human IgG4 AA CH2 with alanine substitutions at G236 and N297
APEFLAGPSVFLFPPKPKDTLMISRTPEVTCVVVDVSQEDPEVQFNWYVDGVEVHNAKTKPREEQFNSTYRVVSVLTVLHQDWLNGKEYKCKVSNKGLPSSIEKTISKAK

SEQ ID NO: 346 - protein, 110 aa, Artificial Sequence
  human IgG4 AA CH2 with alanine substitutions at G237 and N297
APEFLGAPSVFLFPPKPKDTLMISRTPEVTCVVVDVSQEDPEVQFNWYVDGVEVHNAKTKPREEQFNSTYRVVSVLTVLHQDWLNGKEYKCKVSNKGLPSSIEKTISKAK

SEQ ID NO: 347-378 - skipped (32 entries)

SEQ ID NO: 379 - protein, 15 aa, Artificial Sequence
  Linker 134
EPMSCDKTHTCPPCP

SEQ ID NO: 380 - protein, 15 aa, Artificial Sequence
  Linker 135
EPMSSDKTHTCPPCP

SEQ ID NO: 381 - protein, 15 aa, Artificial Sequence
  Linker 136
EPMSCDKTHTSPPCP

SEQ ID NO: 382 - protein, 15 aa, Artificial Sequence
  Linker 137
EPMSCDKTHTCPPSP

SEQ ID NO: 383 - protein, 15 aa, Artificial Sequence
  Linker 138
EPMSSDKTHTSPPCP

SEQ ID NO: 384 - protein, 15 aa, Artificial Sequence
  Linker 139
EPMSSDKTHTCPPSP

SEQ ID NO: 385 - protein, 15 aa, Artificial Sequence
  Linker 140
EPMSCDKTHTSPPSP

SEQ ID NO: 386 - protein, 15 aa, Artificial Sequence
  Linker 141
EPMSCDKTHTCPPCS

SEQ ID NO: 387 - protein, 15 aa, Artificial Sequence
  Linker 142
EPMSSDKTHTCPPCS

SEQ ID NO: 388 - protein, 15 aa, Artificial Sequence
  Linker 143
EPMSCDKTHTSPPCS

SEQ ID NO: 389 - protein, 15 aa, Artificial Sequence
  Linker 144
EPMSCDKTHTCPPSS

SEQ ID NO: 390 - protein, 15 aa, Artificial Sequence
  Linker 145
EPMSSDKTHTSPPCS

SEQ ID NO: 391 - protein, 15 aa, Artificial Sequence
  Linker 146
EPMSSDKTHTCPPSP

SEQ ID NO: 392 - protein, 15 aa, Artificial Sequence
  Linker 147
EPMSCDKTHTSPPSS

SEQ ID NO: 393 - protein, 15 aa, Artificial Sequence
  Linker 148
EPTSCDKTHTCPPCP

SEQ ID NO: 394 - protein, 15 aa, Artificial Sequence
  Linker 149
EPTSSDKTHTCPPCP

SEQ ID NO: 395 - protein, 15 aa, Artificial Sequence
  Linker 150
EPTSCDKTHTSPPCP

SEQ ID NO: 396 - protein, 15 aa, Artificial Sequence
  Linker 151
EPTSCDKTHTCPPSP

SEQ ID NO: 397 - protein, 15 aa, Artificial Sequence
  Linker 152
EPTSSDKTHTSPPCP

SEQ ID NO: 398 - protein, 15 aa, Artificial Sequence
  Linker 153
EPTSSDKTHTCPPSP

SEQ ID NO: 399 - protein, 15 aa, Artificial Sequence
  Linker 154
EPTSCDKTHTSPPSP

SEQ ID NO: 400 - protein, 15 aa, Artificial Sequence
  Linker 155
EPTSCDKTHTCPPCS

SEQ ID NO: 401 - protein, 15 aa, Artificial Sequence
  Linker 156
EPTSSDKTHTCPPCS

SEQ ID NO: 402 - protein, 15 aa, Artificial Sequence
  Linker 157
EPTSCDKTHTSPPCS

SEQ ID NO: 403 - protein, 15 aa, Artificial Sequence
  Linker 158
EPTSCDKTHTCPPSS

SEQ ID NO: 404 - protein, 15 aa, Artificial Sequence
  Linker 159
EPTSSDKTHTSPPCS

SEQ ID NO: 405 - protein, 15 aa, Artificial Sequence
  Linker 160
EPTSSDKTHTCPPSS

SEQ ID NO: 406 - protein, 15 aa, Artificial Sequence
  Linker 161
EPTSCDKTHTSPPSS

SEQ ID NO: 407 - protein, 15 aa, Artificial Sequence
  Linker 162
EPASCDKTHTCPPCP

SEQ ID NO: 408 - protein, 15 aa, Artificial Sequence
  Linker 163
EPASSDKTHTCPPCP

SEQ ID NO: 409 - protein, 15 aa, Artificial Sequence
  Linker 164
EPASCDKTHTSPPCP

SEQ ID NO: 410 - protein, 15 aa, Artificial Sequence
  Linker 165
EPASCDKTHTCPPSP

SEQ ID NO: 411 - protein, 15 aa, Artificial Sequence
  Linker 166
EPASSDKTHTSPPCP

SEQ ID NO: 412 - protein, 15 aa, Artificial Sequence
  Linker 167
EPASSDKTHTCPPSP

SEQ ID NO: 413 - protein, 15 aa, Artificial Sequence
  Linker 168
EPASCDKTHTSPPSP

SEQ ID NO: 414 - protein, 15 aa, Artificial Sequence
  Linker 169
EPASCDKTHTCPPCS

SEQ ID NO: 415 - protein, 15 aa, Artificial Sequence
  Linker 170
EPASSDKTHTCPPCS

SEQ ID NO: 416 - protein, 15 aa, Artificial Sequence
  Linker 171
EPASCDKTHTSPPCS

SEQ ID NO: 417 - protein, 15 aa, Artificial Sequence
  Linker 172
EPASCDKTHTCPPSS

SEQ ID NO: 418 - protein, 15 aa, Artificial Sequence
  Linker 173
EPASSDKTHTSPPCS

SEQ ID NO: 419 - protein, 15 aa, Artificial Sequence
  Linker 174
EPASSDKTHTCPPSS

SEQ ID NO: 420 - protein, 15 aa, Artificial Sequence
  Linker 175
EPASCDKTHTSPPSS

SEQ ID NO: 421 - protein, 14 aa, Artificial Sequence
  Linker 176
EPSCDKTHTCPPCP

SEQ ID NO: 422 - protein, 14 aa, Artificial Sequence
  Linker 177
EPSSDKTHTCPPCP

SEQ ID NO: 423 - protein, 14 aa, Artificial Sequence
  Linker 178
EPSCDKTHTSPPCP

SEQ ID NO: 424 - protein, 14 aa, Artificial Sequence
  Linker 179
EPSCDKTHTCPPSP

SEQ ID NO: 425 - protein, 14 aa, Artificial Sequence
  Linker 180
EPSSDKTHTSPPCP

SEQ ID NO: 426 - protein, 14 aa, Artificial Sequence
  Linker 181
EPSSDKTHTCPPSP

SEQ ID NO: 427 - protein, 14 aa, Artificial Sequence
  Linker 182
EPSCDKTHTSPPSP

SEQ ID NO: 428 - protein, 14 aa, Artificial Sequence
  Linker 183
EPSCDKTHTCPPCS

SEQ ID NO: 429 - protein, 14 aa, Artificial Sequence
  Linker 184
EPSSDKTHTCPPCS

SEQ ID NO: 430 - protein, 14 aa, Artificial Sequence
  Linker 185
EPSCDKTHTSPPCS

SEQ ID NO: 431 - protein, 14 aa, Artificial Sequence
  Linker 186
EPSCDKTHTCPPSS

SEQ ID NO: 432 - protein, 14 aa, Artificial Sequence
  Linker 187
EPSSDKTHTSPPCS

SEQ ID NO: 433 - protein, 14 aa, Artificial Sequence
  Linker 188
EPSSDKTHTCPPSS

SEQ ID NO: 434 - protein, 14 aa, Artificial Sequence
  Linker 189
EPSCDKTHTSPPSS

SEQ ID NO: 435-463 - skipped (29 entries)

SEQ ID NO: 464 - protein, 5 aa, Artificial Sequence
  Anti-c-Met Heavy Chain Complementarity Determining Region
KYDML

SEQ ID NO: 465 - protein, 17 aa, Artificial Sequence
  Anti-c-Met Heavy Chain Complementarity Determining Region
YIYPSGGLTEYADSVKG

SEQ ID NO: 466 - protein, 10 aa, Artificial Sequence
  Anti-c-Met Heavy Chain Complementarity Determining Region
RAPRSLSFDI

SEQ ID NO: 467-594 - skipped (128 entries)

SEQ ID NO: 595 - protein, 110 aa, Artificial Sequence
  Human IgG1 CH2 with L235A, E318A, K320A and K322A substitutions
APELAGGPSVFLFPPKPKDTLMISRTPEVTCVVVDVSHEDPEVKFNWYVDGVEVHNAKTKPREEQYNSTYRVVSVLTVLHQDWLNGKAYACAVSNKALPAPIEKTISKAK

SEQ ID NO: 596 - protein, 110 aa, Artificial Sequence
  Human IgG1 CH2 with L234A, L235A, G237A, E318A, K320A and K322A
APEAAGAPSVFLFPPKPKDTLMISRTPEVTCVVVDVSHEDPEVKFNWYVDGVEVHNAKTKPREEQYNSTYRVVSVLTVLHQDWLNGKAYACAVSNKALPAPIEKTISKAK

SEQ ID NO: 597 - skipped

SEQ ID NO: 598 - protein, 3 aa, Artificial Sequence
  Junction amino acids
RDQ

SEQ ID NO: 599 - protein, 4 aa, Artificial Sequence
  Junction amino acids
SASS

SEQ ID NO: 600 - protein, 3 aa, Artificial Sequence
  Junction amino acids
SSS

SEQ ID NO: 601 - protein, 17 aa, Artificial Sequence
  NKG2D Linker
NSLFNQEVQIPLTESYS

SEQ ID NO: 602 - protein, 107 aa, Artificial Sequence
  Anti-RON mAb 4C04 light chain
DIQMTQSPASQSASLGESVTITCLASQTIGTWLAWYQQKPGKSPQLLIYAATSLADGVPSRFSASGSGTKFSFKIDSLQSEDFVSYYCQQLYNTPWTFGGGTKLEIK

SEQ ID NO: 603 - protein, 121 aa, Artificial Sequence
  Anti-RON mAb 4C04 heavy chain
QIQLQQSGPELVKPGTSVKISCKASDYTLTDFYMNWVRQKPGQGLEWIGRIYPGTDKTRYNEKFRDKAILTVDTSSSTAYMQLSSLTSEDTAVYFCARSAYYGNYVAMDYWGQGTSVTVSS

SEQ ID NO: 604 - protein, 6 aa, Artificial Sequence
  Anti-RON mAb 4C04 light chain CDR1
QTIGTW

SEQ ID NO: 605 - protein, 3 aa, Artificial Sequence
  Anti-RON mAb 4C04 light chain CDR2
AAT

SEQ ID NO: 606 - protein, 9 aa, Artificial Sequence
  Anti-RON mAb 4C04 light chain CDR3
QQLYNTPWT

SEQ ID NO: 607 - protein, 8 aa, Artificial Sequence
  Anti-RON mAb 4C04 heavy chain CDR1
DYTLTDFY

SEQ ID NO: 608 - protein, 8 aa, Artificial Sequence
  Anti-RON mAb 4C04 heavy chain CDR2
IYPGTDKT

SEQ ID NO: 609 - protein, 14 aa, Artificial Sequence
  Anti-RON mAb 4C04 heavy chain CDR3
ARSAYYGNYVAMDY

SEQ ID NO: 610 - protein, 107 aa, Artificial Sequence
  Anti-RON mAb 11H09 light chain
DIQMTQSPSSLSASLGERVSLTCRASQDIGSSLSWLQQEPDGTIKRLIYSTSSLDSGVPKRFSGSRSGSDYSLTISSLESEDFVDYYCLQYASSPWTFGGGTKLEIK

SEQ ID NO: 611 - protein, 117 aa, Artificial Sequence
  Anti-RON mAb 11H09 heavy chain
QVQLQQSGAELAKPGASVKMSCKSSGYTFTSYWIHWVKERPGQGLEWIGYIYPTTGYTESNQKFKDKATLTADKSSSTAYMQLSSLTSEDSAVYYCFLLRPWYFDVWGAGTTVTVSS

SEQ ID NO: 612 - protein, 6 aa, Artificial Sequence
  Anti-RON mAb 11H09 light chain CDR1
QDIGSS

SEQ ID NO: 613 - protein, 3 aa, Artificial Sequence
  Anti-RON mAb 11H09 light chain CDR2
STS

SEQ ID NO: 614 - protein, 9 aa, Artificial Sequence
  Anti-RON mAb 11H09 light chain CDR3
LQYASSPWT

SEQ ID NO: 615 - protein, 8 aa, Artificial Sequence
  Anti-RON mAb 11H09 heavy chain CDR1
GYTFTSYW

SEQ ID NO: 616 - protein, 8 aa, Artificial Sequence
  Anti-RON mAb 11H09 heavy chain CDR2
IYPTTGYT

SEQ ID NO: 617 - protein, 10 aa, Artificial Sequence
  Anti-RON mAb 11H09 heavy chain CDR3
FLLRPWYFDV

SEQ ID NO: 618 - protein, 2 aa, Artificial Sequence
  Made in a lab
NS

SEQ ID NO: 619 - protein, 6 aa, Artificial Sequence
  Made in a lab
SCPPCP

SEQ ID NO: 620 - protein, 8 aa, Artificial Sequence
  Made in a lab
GGGGSGNS

SEQ ID NO: 621 - protein, 8 aa, Artificial Sequence
  Made in a lab
GCPPCPNS

SEQ ID NO: 622 - protein, 8 aa, Artificial Sequence
  Made in a lab
GSPPSPNS

SEQ ID NO: 623 - protein, 8 aa, Artificial Sequence
  Made in a lab
GSPPSPNS

SEQ ID NO: 624 - protein, 8 aa, Artificial Sequence
  Made in a lab
GCPPCPNS

SEQ ID NO: 625 - protein, 8 aa, Artificial Sequence
  Made in a lab
GCPPCPNS

SEQ ID NO: 626 - protein, 9 aa, Artificial Sequence
  Made in a lab
GCPPCPGNS

SEQ ID NO: 627 - protein, 9 aa, Artificial Sequence
  Made in a lab
GCPPCPANS

SEQ ID NO: 628 - protein, 9 aa, Artificial Sequence
  Made in a lab
GCPPCPANS

SEQ ID NO: 629 - protein, 9 aa, Artificial Sequence
  Made in a lab
EEEEDEGNS

SEQ ID NO: 630 - protein, 10 aa, Artificial Sequence
  Made in a lab
NYGGGGSGNS

SEQ ID NO: 631 - protein, 10 aa, Artificial Sequence
  Made in a lab
VSERPFPPNS

SEQ ID NO: 632 - protein, 11 aa, Artificial Sequence
  Made in a lab
EPKSCDKTCCP

SEQ ID NO: 633 - protein, 11 aa, Artificial Sequence
  Made in a lab
SQPEIVPISNS

SEQ ID NO: 634 - protein, 12 aa, Artificial Sequence
  Made in a lab
GGGGSCPPCPNS

SEQ ID NO: 635 - protein, 12 aa, Artificial Sequence
  Made in a lab
KADFLTPSIGNS

SEQ ID NO: 636 - protein, 12 aa, Artificial Sequence
  Made in a lab
QMNSELSVLANS

SEQ ID NO: 637 - protein, 13 aa, Artificial Sequence
  Made in a lab
EPKSCDKTHTCCP

SEQ ID NO: 638 - protein, 13 aa, Artificial Sequence
  Made in a lab
EPKSCDKTCPPCP

SEQ ID NO: 639 - protein, 13 aa, Artificial Sequence
  Made in a lab
GGGGSGGGGSGNS

SEQ ID NO: 640 - protein, 13 aa, Artificial Sequence
  Made in a lab
GCPPCPGGGGSNS

SEQ ID NO: 641 - protein, 13 aa, Artificial Sequence
  Made in a lab
GGGGSCPPCPGNS

SEQ ID NO: 642 - protein, 13 aa, Artificial Sequence
  Made in a lab
GCPPCPGGGGSNS

SEQ ID NO: 643 - protein, 13 aa, Artificial Sequence
  Made in a lab
GGGASCPPCPGNS

SEQ ID NO: 644 - protein, 13 aa, Artificial Sequence
  Made in a lab
GGGASCPPCAGNS

SEQ ID NO: 645 - protein, 13 aa, Artificial Sequence
  Made in a lab
GGGASCPPCAGNS

SEQ ID NO: 646 - protein, 15 aa, Artificial Sequence
  Made in a lab
NYGGGGSGGGGSGNS

SEQ ID NO: 647 - protein, 15 aa, Artificial Sequence
  Made in a lab
LSVKADFLTPSIGNS

SEQ ID NO: 648 - protein, 15 aa, Artificial Sequence
  Made in a lab
LSVLANFSQPEIGNS

SEQ ID NO: 649 - protein, 15 aa, Artificial Sequence
  Made in a lab
LKIQERVSKPKISNS

SEQ ID NO: 650 - protein, 15 aa, Artificial Sequence
  Made in a lab
LDVSERPFPPHIQNS

SEQ ID NO: 651 - protein, 15 aa, Artificial Sequence
  Made in a lab
REQLAEVTLSLKANS

SEQ ID NO: 652 - protein, 15 aa, Artificial Sequence
  Made in a lab
RIHQMNSELSVLANS

SEQ ID NO: 653 - protein, 15 aa, Artificial Sequence
  Made in a lab
DTKGKNVLEKIFSNS

SEQ ID NO: 654 - protein, 15 aa, Artificial Sequence
  Made in a lab
LPPETQESQEVTLNS

SEQ ID NO: 655 - protein, 15 aa, Artificial Sequence
  Made in a lab
RIHLNVSERPFPPNS

SEQ ID NO: 656 - protein, 15 aa, Artificial Sequence
  Made in a lab
LSVKADFLTPSIGNS

SEQ ID NO: 657 - protein, 15 aa, Artificial Sequence
  Made in a lab
LSVLANFSQPEIGNS

SEQ ID NO: 658 - protein, 15 aa, Artificial Sequence
  Made in a lab
LSVLANFSQPEIGNS

SEQ ID NO: 659 - protein, 15 aa, Artificial Sequence
  Made in a lab
RIHQMNSELSVLANS

SEQ ID NO: 660 - protein, 15 aa, Artificial Sequence
  Made in a lab
KPFFTCGSADTCPNS

SEQ ID NO: 661 - protein, 15 aa, Artificial Sequence
  Made in a lab
KPFFTCGSADTCPNS

SEQ ID NO: 662 - protein, 15 aa, Artificial Sequence
  Made in a lab
QYNCPGQYTFSMPNS

SEQ ID NO: 663 - protein, 15 aa, Artificial Sequence
  Made in a lab
GGGGSGGGGSGGGGS

SEQ ID NO: 664 - protein, 15 aa, Artificial Sequence
  Made in a lab
EPKSSDKTHTCPPCP

SEQ ID NO: 665 - protein, 15 aa, Artificial Sequence
  Made in a lab
EPKSSDKTHTCPPCS

SEQ ID NO: 666 - protein, 15 aa, Artificial Sequence
  Made in a lab
EPKSCDKTHTSPPCS

SEQ ID NO: 667 - protein, 15 aa, Artificial Sequence
  Made in a lab
EPKSCDKTHTCPPCP

SEQ ID NO: 668 - protein, 15 aa, Artificial Sequence
  Made in a lab
EPKSCDKTHTSPPSS

SEQ ID NO: 669 - protein, 15 aa, Artificial Sequence
  Made in a lab
PRGPTIKPCPPCKCP

SEQ ID NO: 670 - protein, 15 aa, Artificial Sequence
  Made in a lab
EPKSSDKTHTSPPSS

SEQ ID NO: 671 - protein, 15 aa, Artificial Sequence
  Made in a lab
EPKSSDKTHTSPPCS

SEQ ID NO: 672 - protein, 15 aa, Artificial Sequence
  Made in a lab
EPKSSDKTHTCPPSS

SEQ ID NO: 673 - protein, 15 aa, Artificial Sequence
  Made in a lab
EPKSCDKTHTSPPCP

SEQ ID NO: 674 - protein, 15 aa, Artificial Sequence
  Made in a lab
EPKSSDKTHTSPPSP

SEQ ID NO: 675 - protein, 15 aa, Artificial Sequence
  Made in a lab
EPKSSDKTHTSPPCP

SEQ ID NO: 676 - protein, 15 aa, Artificial Sequence
  Made in a lab
EPKSCDKTHTSPPSP

SEQ ID NO: 677 - protein, 15 aa, Artificial Sequence
  Made in a lab
EPKSSDKTHTCPPSP

SEQ ID NO: 678 - protein, 15 aa, Artificial Sequence
  Made in a lab
GGGGCDKTHTCPPCP

SEQ ID NO: 679 - protein, 15 aa, Artificial Sequence
  Made in a lab
EPKSCGGGGGCPPCP

SEQ ID NO: 680 - protein, 15 aa, Artificial Sequence
  Made in a lab
EPKSCDKTHTCGGCP

SEQ ID NO: 681 - protein, 15 aa, Artificial Sequence
  Made in a lab
EPKSCDKTHTCPPCG

SEQ ID NO: 682 - protein, 15 aa, Artificial Sequence
  Made in a lab
EPKSCDKTHTCPPSP

SEQ ID NO: 683 - protein, 15 aa, Artificial Sequence
  Made in a lab
EPKSCDKCHTCPPCP

SEQ ID NO: 684 - protein, 15 aa, Artificial Sequence
  Made in a lab
EPKSCDKTCCCPPCP

SEQ ID NO: 685 - protein, 15 aa, Artificial Sequence
  Made in a lab
EPKSCPPPPPCPPCP

SEQ ID NO: 686 - protein, 15 aa, Artificial Sequence
  Made in a lab
PPPPCDKTHTCPPCP

SEQ ID NO: 687 - protein, 15 aa, Artificial Sequence
  Made in a lab
EPKSCDKTHTCWWCP

SEQ ID NO: 688 - protein, 15 aa, Artificial Sequence
  Made in a lab
EPKSCDWWHTCPPCP

SEQ ID NO: 689 - protein, 15 aa, Artificial Sequence
  Made in a lab
EPKCSDKTHTCPPCP

SEQ ID NO: 690 - protein, 15 aa, Artificial Sequence
  Made in a lab
EPKSDCKTHTCPPCP

SEQ ID NO: 691 - protein, 15 aa, Artificial Sequence
  Made in a lab
EPKSDCWWHTCPPCP

SEQ ID NO: 692 - protein, 15 aa, Artificial Sequence
  Made in a lab
EPKSCDFFHTCPPCP

SEQ ID NO: 693 - protein, 15 aa, Artificial Sequence
  Made in a lab
EPKSCDWWWTCPPCP

SEQ ID NO: 694 - protein, 15 aa, Artificial Sequence
  Made in a lab
EPKSCWWTHTCPPCP

SEQ ID NO: 695 - protein, 15 aa, Artificial Sequence
  Made in a lab
EPWWCDKTHTCPPCP

SEQ ID NO: 696 - protein, 16 aa, Artificial Sequence
  Made in a lab
SQPEIVPISCPPCPNS

SEQ ID NO: 697 - protein, 17 aa, Artificial Sequence
  Made in a lab
TGEPKSSDKTHTCPPCP

SEQ ID NO: 698 - protein, 17 aa, Artificial Sequence
  Made in a lab
EPKSTDKTHTCPPCPNS

SEQ ID NO: 699 - protein, 17 aa, Artificial Sequence
  Made in a lab
EPKSTDKTHTSPPSPNS

SEQ ID NO: 700 - protein, 17 aa, Artificial Sequence
  Made in a lab
EPKSTDKTHTCPPCPNS

SEQ ID NO: 701 - protein, 17 aa, Artificial Sequence
  Made in a lab
EPKSSDKTHTCPPCPNS

SEQ ID NO: 702 - protein, 18 aa, Artificial Sequence
  Made in a lab
EPKSCDKTHTCPGGGPCP

SEQ ID NO: 703 - protein, 18 aa, Artificial Sequence
  Made in a lab
EPKSCDGGGKTHTCPPCP

SEQ ID NO: 704 - protein, 18 aa, Artificial Sequence
  Made in a lab
EPKSCDPPPKTHTCPPCP

SEQ ID NO: 705 - protein, 18 aa, Artificial Sequence
  Made in a lab
EPKSCDKTHTCPPPPPCP

SEQ ID NO: 706 - protein, 18 aa, Artificial Sequence
  Made in a lab
GGGGSGGGGSGGGGSGNS

SEQ ID NO: 707 - protein, 19 aa, Artificial Sequence
  Made in a lab
NYGGGGSGGGGSGGGGSNS

SEQ ID NO: 708 - protein, 19 aa, Artificial Sequence
  Made in a lab
LSVKADFLTPSISPPCPNS

SEQ ID NO: 709 - protein, 19 aa, Artificial Sequence
  Made in a lab
SVLANFSQPEISCPPCPNS

SEQ ID NO: 710 - protein, 20 aa, Artificial Sequence
  Made in a lab
GQRHNNSSLNTRTQKARHSP

SEQ ID NO: 711 - protein, 20 aa, Artificial Sequence
  Made in a lab
LSVLANFSQPEISCPPCPNS

SEQ ID NO: 712 - protein, 20 aa, Artificial Sequence
  Made in a lab
LKIQERVSKPKISCPPCPNS

SEQ ID NO: 713 - protein, 20 aa, Artificial Sequence
  Made in a lab
REQLAEVTLSLKACPPCPNS

SEQ ID NO: 714 - protein, 20 aa, Artificial Sequence
  Made in a lab
RIHQMNSELSVLACPPCPNS

SEQ ID NO: 715 - protein, 20 aa, Artificial Sequence
  Made in a lab
RIHLNVSERPFPPCPPCPNS

SEQ ID NO: 716 - protein, 20 aa, Artificial Sequence
  Made in a lab
NSLFNQEVQIPLTESYCPNS

SEQ ID NO: 717 - protein, 20 aa, Artificial Sequence
  Made in a lab
EEEEDEEDEEDEEEEEDGNS

SEQ ID NO: 718 - protein, 21 aa, Artificial Sequence
  Made in a lab
LDVSERPFPPHIQSCPPCPNS

SEQ ID NO: 719 - protein, 21 aa, Artificial Sequence
  Made in a lab
DTKGKNVLEKIFDSCPPCPNS

SEQ ID NO: 720 - protein, 21 aa, Artificial Sequence
  Made in a lab
LPPETQESQEVTLSCPPCPNS

SEQ ID NO: 721 - protein, 21 aa, Artificial Sequence
  Made in a lab
EPAFTPGPNIELQKDSDCPNS

SEQ ID NO: 722 - protein, 21 aa, Artificial Sequence
  Made in a lab
QRHNNSSLNTRTQKARHCPNS

SEQ ID NO: 723 - protein, 21 aa, Artificial Sequence
  Made in a lab
QRHNNSSLNTRTQKARHSPNS

SEQ ID NO: 724 - protein, 36 aa, Artificial Sequence
  Made in a lab
NYGGGGSGGGGSGGGGSNYGGGGSGGGGSGGGGSNS

SEQ ID NO: 725 - protein, 122 aa, Artificial Sequence
  Made in a lab
RTRYLQVSQQLQQTNRVLEVTNSSLRQQLRLKITQLGQSAEDLQGSRRELAQSQEALQVEQRAHQAAEGQLQACQADRQKTKETLQSEEQQRRALEQKLSNMENRLKPFFTCGSADTCCPNS

SEQ ID NO: 726 - protein, 13 aa, Artificial Sequence
  Made in a lab
GGGASCPPCAGNS

SEQ ID NO: 727 - protein, 39 aa, Artificial Sequence
  Made in a lab
NNYGGGGSGGGGSGGGGSGNYGGGGSGGGGSGGGGSGNS

SEQ ID NO: 728 - protein, 20 aa, Artificial Sequence
  Made in a lab
NYGGGGSGGGGSGGGGSGNS

SEQ ID NO: 729 - protein, 7 aa, Artificial Sequence
  Made in a lab
SPPSPNS

SEQ ID NO: 730 - protein, 17 aa, Artificial Sequence
  Made in a lab
EPTSTDKTHTSPPSPNS

SEQ ID NO: 731 - protein, 17 aa, Artificial Sequence
  Made in a lab
EPTSTDKTHTCPPCPNS

SEQ ID NO: 732 - protein, 19 aa, Artificial Sequence
  Made in a lab
LSVKADFLTPSISPPCPNS

SEQ ID NO: 733 - protein, 12 aa, Artificial Sequence
  Made in a lab
GGGASCPPCANS

SEQ ID NO: 734 - protein, 22 aa, Artificial Sequence
  Made in a lab
RTQRHNNSSLNTRTQKARHSGH

SEQ ID NO: 735 - protein, 118 aa, Artificial Sequence
  Made in a lab
RTRYLQVSQQLQQTNRVLEVTNSSLRQQLRLKITQLGQSAEDLQGSRRELAQSQEALQVEQRAHQAAEGQLQACQADRQKTKETLQSEEQQRRALEQKLSNMENRLKPFFTCGSADTC

SEQ ID NO: 736 - protein, 35 aa, Artificial Sequence
  Made in a lab
RTQSEEQQRRALEQKLSNMENRLKPFFTCGSADTC

SEQ ID NO: 737 - protein, 25 aa, Artificial Sequence
  Made in a lab
RTEQKLSNMENRLKPFFTCGSADTC

SEQ ID NO: 738 - protein, 26 aa, Artificial Sequence
  Made in a lab
SGGGGSGGGGSGGGGSGGGGSGGGGS

SEQ ID NO: 739 - protein, 16 aa, Artificial Sequence
  Made in a lab
GGGGSGGGGSGGGGAS

SEQ ID NO: 740 - protein, 16 aa, Artificial Sequence
  Made in a lab
SEPKSSDKTHTCPPCP

SEQ ID NO: 741 - protein, 18 aa, Artificial Sequence
  Made in a lab
GDQEPKSSDKTHTSPPCP

SEQ ID NO: 742 - protein, 21 aa, Artificial Sequence
  Made in a lab
QRHNNSSLNTGTQMAGHSPNS

SEQ ID NO: 743 - protein, 21 aa, Artificial Sequence
  Made in a lab
QRHNNSSLNTGTQKARHSPNS

SEQ ID NO: 744 - protein, 21 aa, Artificial Sequence
  Made in a lab
QRHNNSSLNTGTQMARHSPNS

SEQ ID NO: 745 - protein, 21 aa, Artificial Sequence
  Made in a lab
QRHNNSSLNTRTQKAGHSPNS

SEQ ID NO: 746 - protein, 21 aa, Artificial Sequence
  Made in a lab
QRHNNSSLNTRTQMAGHSPNS

SEQ ID NO: 747 - protein, 21 aa, Artificial Sequence
  Made in a lab
QRHNNSSLNTRTQMARHSPNS

SEQ ID NO: 748 - protein, 10 aa, Artificial Sequence
  Hinge sequence
PPPPPCPPCP

SEQ ID NO: 749 - protein, 16 aa, Artificial Sequence
  Hinge sequence
TEPKSSDKTHTCPPCP

SEQ ID NO: 750 - protein, 20 aa, Artificial Sequence
  Hinge sequence
EPKSSDKTHTSPPSPCPPCP

SEQ ID NO: 751 - protein, 20 aa, Artificial Sequence
  Hinge sequence
EPKSSDTPPPSPRSPCPPCP

SEQ ID NO: 752 - protein, 23 aa, Artificial Sequence
  Hinge sequence
PSTPPTPSPSTPPTPSPSCPPCP

SEQ ID NO: 753 - protein, 23 aa, Artificial Sequence
  Hinge sequence
RTEPRVPITQNPCPPLKECPPCA

SEQ ID NO: 754 - protein, 39 aa, Artificial Sequence
  Hinge sequence
ESPKAQASSVPTAQPQAEGSLAKATTAPATTRNTCPPCP

SEQ ID NO: 755 - protein, 50 aa, Artificial Sequence
  Hinge sequence
QEKEAIERLKAAGAPESLVIQAYFASEKNENLAANFLLSQNFDDECPPCP

SEQ ID NO: 756 - protein, 52 aa, Artificial Sequence
  Hinge sequence
QEKEAIERLKAAGAPESLVIQAYFASEKNENLAANFLLSQNFDDECPPCPSG

SEQ ID NO: 757 - protein, 110 aa, Artificial Sequence
  Hinge sequence
SRDFTPPTVKILQSSSDGGGHFPPTIQLLCLVSGYTPGTINITWLEDGQVMDVDLSTASTTQEGELASTQSELTLSQKHWLSDRTYTCQVTYQGHTFEDSTKKSACPPCP

SEQ ID NO: 758 - protein, 111 aa, Artificial Sequence
  Hinge sequence
SRDFTPPTVKILQSSSDGGGHFPPTIQLLCLVSGYTPGTINITWLEDGQVMDVDLSTASTTQEGELASTQSELTLSQKHWLSDRTYTCQVTYQGHTFEDSTKKSACPPCSG

SEQ ID NO: 759 - protein, 116 aa, Artificial Sequence
  Hinge sequence
IAELPPKVSVFVPPRDGFFGNPRKSKLICQATGFSPRQIQVSWLREGKQVGSGVTTDQVQAEAKESGPTTYKVTSTLTIKESDWLGQSMFTCRVDHRGLTFQQNASSMSVPCPPCP

SEQ ID NO: 760 - protein, 6 aa, Artificial Sequence
  linker sequence of monoIL-10
GGGSGG

SEQ ID NO: 761 - protein, 106 aa, Homo sapiens [sequence omitted]

SEQ ID NO: 762 - protein, 216 aa, Artificial Sequence
  IgG1 CH2 CH3 Null2 desLys
APEAAGAPSVFLFPPKPKDTLMISRTPEVTCVVVDVSHEDPEVKFNWYVDGVEVHNAKTKPREEQYNSTYRVVSVLTVLHQDWLNGKAYACAVSNKALPAPIEKTISKAKGQPREPQVYTLPPSRDELTKNQVSLTCLVKGFYPSDIAVEWESNGQPENNYKTTPPVLDSDGSFFLYSKLTVDKSRWQQGNVFSCSVMHEALHNHYTQKSLSLSPG

SEQ ID NO: 763 - protein, 7 aa, Artificial Sequence
  Peptide linker
SPPSPNS

SEQ ID NO: 764 - protein, 17 aa, Artificial Sequence
  Peptide linker
EPTSTDKTHTSPPSPNS

SEQ ID NO: 765 - protein, 17 aa, Artificial Sequence
  Peptide linker
EPTSTDKTHTCPPCPNS

SEQ ID NO: 766 - protein, 16 aa, Artificial Sequence
  Peptide linker
NQEVQIPLTESYSPNS

SEQ ID NO: 767 - protein, 20 aa, Artificial Sequence
  Peptide linker
NSGANQEVQIPLTESYSPNS

SEQ ID NO: 768 - protein, 14 aa, Artificial Sequence
  Peptide linker
EVQIPLTESYSPNS

SEQ ID NO: 769 - protein, 20 aa, Artificial Sequence
  Peptide linker
NSGFNQEVQIPLTESYSPNS

SEQ ID NO: 770 - protein, 20 aa, Artificial Sequence
  Peptide linker
NSLANQEVQIPLTESYSPNS

SEQ ID NO: 771 - protein, 20 aa, Artificial Sequence
  Peptide linker
NSLFSQEVQIPLTESYSPNS

SEQ ID NO: 772 - protein, 20 aa, Artificial Sequence
  Peptide linker
NSLASQEVQIPLTESYSPNS

SEQ ID NO: 773 - protein, 26 aa, Artificial Sequence
  Peptide linker
EQKLSNMENRLKPFFTSGSADTSPNS

SEQ ID NO: 774 - protein, 21 aa, Artificial Sequence
  Peptide linker
QRHANSALNTGTQMAGHSPNS

SEQ ID NO: 775 - protein, 21 aa, Artificial Sequence
  Peptide linker
QRHNAASLNTGTQMAGHSPNS

SEQ ID NO: 776 - protein, 21 aa, Artificial Sequence
  Peptide linker
QRHAASSLNTGTQMAGHSPNS

SEQ ID NO: 777 - protein, 19 aa, Artificial Sequence
  Peptide linker
QRHSSLNTGTQMAGHSPNS

SEQ ID NO: 778 - protein, 21 aa, Artificial Sequence
  Peptide linker
QRHGGSSLNTGTQMAGHSPNS

SEQ ID NO: 779 - protein, 11 aa, Artificial Sequence
  Peptide linker
HDGSSLNTPNS

SEQ ID NO: 780 - protein, 16 aa, Artificial Sequence
  Peptide linker
SSLNTGTQMAGHSPNS

SEQ ID NO: 781 - protein, 16 aa, Artificial Sequence
  Peptide linker
SSLNTRTQMAGHSPNS

SEQ ID NO: 782 - protein, 16 aa, Artificial Sequence
  Peptide linker
SSLNTGTQMARHSPNS

SEQ ID NO: 783 - protein, 16 aa, Artificial Sequence
  Peptide linker
SSLNTGTQKAGHSPNS

SEQ ID NO: 784 - protein, 16 aa, Artificial Sequence
  Peptide linker
SSLNTGTQKARHSPNS

SEQ ID NO: 785 - protein, 16 aa, Artificial Sequence
  Peptide linker
SSLNTRTQMARHSPNS

SEQ ID NO: 786 - protein, 16 aa, Artificial Sequence
  Peptide linker
SSLNTRTQKAGHSPNS

SEQ ID NO: 787 - protein, 17 aa, Artificial Sequence
  Peptide linker
NSLFNQEVQIPLTEPNS

SEQ ID NO: 788 - protein, 14 aa, Artificial Sequence
  Peptide linker
NSLFNQEVQIPPNS

SEQ ID NO: 789 - protein, 11 aa, Artificial Sequence
  Peptide linker
NSLFNQEVPNS

SEQ ID NO: 790 - protein, 13 aa, Artificial Sequence
  Peptide linker
QRHNNSSLNTPNS

SEQ ID NO: 791 - protein, 19 aa, Artificial Sequence
  Peptide linker
SGGGGSGGGGSGGGGSPNS

SEQ ID NO: 792 - DNA, 2730 bp, Artificial Sequence
  TSC038 comprises: G19-4 (anti-CD3) scFv, human IgG1 SCC-P hinge, human IgG1 CH2, human IgG1 CH3, human Ck(YAE), H75 linker and 3D1 (anti-CD86) scFv
acgactcactatagggagacccaagcttgccgccatggaagcaccagcgcagcttctcttcctcctgctactctggctcccagataccaccggtgaggtccagctgcaacagtctggacctgaactggtgaagcctggagcttcaatgaagatttcctgcaaggcctctggttactcattcactggctacatcgtgaactggctgaagcagagccatggaaagaaccttgagtggattggacttattaatccatacaaaggtcttactacctacaaccagaaattcaagggcaaggccacattaactgtagacaagtcatccagcacagcctacatggagctcctcagtctgacatctgaagactctgcagtctattactgtgcaagatctgggtactatggtgactcggactggtacttcgatgtctggggcgcagggaccacggtcaccgtctcaagcggtggcggagggtctgggggtggcggatccggaggtggtggctctgcacaagacatccagatgacacagactacatcctccctgtctgcctctctgggagacagagtcaccatcagttgcagggcaagtcaggacattcgcaattatttaaactggtatcagcagaaaccagatggaactgttaaactcctgatctactacacatcaagattacactcaggagtcccatcaaggttcagtggcagtgggtctggaacagattattctctcaccattgccaacctgcaaccagaagatattgccacttacttttgccaacagggtaatacgcttccgtggacgttcggtggaggcaccaaactggtaaccaaacgctcgagcgagcccaaatcttctgacaaaactcacacatgcccaccgtgcccatccggagcacctgaactcctgggtggaccgtcagtcttcctcttccccccaaaacccaaggacaccctcatgatctcccggacccctgaggtcacatgcgtggtggtggacgtgagccacgaagaccctgaggtcaagttcaactggtacgtggacggcgtggaggtgcataatgccaagacaaagccgcgggaggagcagtacaacagcacgtaccgtgtggtcagcgtcctcaccgtcctgcaccaggactggctgaatggcaaggagtacaagtgcaaggtctccaacaaagccctcccagcccccatcgagaaaaccatctccaaagccaaagggcagccccgagaaccacaggtgtacaccctgcccccatcccgggatgagctgaccaagaaccaggtcagcctgacctgcctggtcaaaggcttctatccaagcgacatcgccgtggagtgggagagcaatgggcagccggagaacaactacaagaccacgcctcccgtgctggactccgacggctccttcttcctctacagcaagctcaccgtggacaagagcaggtggcagcaggggaacgtcttctcatgctccgtgatgcatgaggctctgcacaaccactacacgcagaagagcctctccctgtctccgggtaaatctagaactgtggctgcaccatctgtcttcatcttcccgccatctgatgagcagttgaaatctggaactgcctctgttgtgtgcctgctgaattacttctatcccagagaggccaaagtacagtggaaggtggataacgccctccaatcgggtaactcccaggagagtgccacagagcaggacagcaaggacagcacctacagcctcagcagcgagctgacgctgagcaaagcagactacgagaaacacaaagtctacgcctgcgaagtcacccatcagggcctgagctcgcccgtcacaaagagcttcaacaggggagagcagaggcacaacaattcttccctgaatacaggaactcagatggcaggtcattctccgaattctcaggtccagctgcagcagtctgggcctgagctggtgaggcctggggaatcagtgaagatttcctgcaagggttccggctacacattcactgattatgctatacagtgggtgaagcagagtcatgcaaagagtctagagtggattggagttattaatatttactatgataatacaaactacaaccagaagtttaagggcaaggccacaatgactgtagacaaatcctccagcacagcctatatggaacttgccagattgacatctgaggattctgccatctattactgtgcaagagcggcctggtatatggactactggggtcaaggaacctcagtcaccgtctcctcagggggtggaggctctggtggcggtggctctggcggaggtggatccggtggcggcggatctgacattgtgctgtcacagtctccatcctccctggctgtgtcagcaggagagaaggtcactatgagctgcaaatccagtcagagtctgctcaacagtagaacccgagagaactacttggcttggtaccagcagaaaccagggcagtctcctaaactgctgatctactgggcatccactagggaatctggggtccctgatcgcttcacaggcagtggatctgggacagatttcactctcaccatcagcagtgtgcaggctgaagacctggcagtttattactgcacgcaatcttataatctttacacgttcggaggggggaccaagctggaaataaaataatctagagcggccgctctagagggccctattctatagtgtcacctaaatgctagagg

SEQ ID NO: 793 - DNA, 1821 bp, Artificial Sequence
  TSC039 comprises: BMA031 (anti-TCR) scFv, human IgG1 SCC-P hinge, human IgG1 CH2, human IgG1 CH3, and human Ck(YAE)
atggaagcaccagcgcagcttctcttcctcctgctactctggctcccagataccaccggtggacaggtccaactagttcagtctggagcagaggttaagaagcctgggagctcagtgaaggtttcctgcaaggcttccggatataaattcactagctatgttatgcactgggtgaagcaggcacctggccaggggctcgagtggattggatatattaatccttacaatgatgttactaagtacaatgagaagttcaaaggcaaggccacacttacggccgacgagtccactaatacagcctacatggagctgagcagcctgagatctgaggacactgcggtccattactgtgcaagagggagctactatgattacgacgggtttgtttactggggccaaggtaccctggtcaccgtctcaagcggtggcggagggtctgggggtggcggatccggaggtggtggctctgcacaagatatccagatgacccaatctccatcgaccctgagtgcatctgtcggggacagagtcaccatgacctgcagtgccacctcaagtgtaagttacatgcactggtatcagcagaagcccgggaaggctcccaaaagatggatctatgacacatccaaactggcttctggagtccctgcgcgcttcattggcagtgggtctgggaccgagttcacgctcacaatcagcagcctgcagccagatgatttcgctacgtattactgccagcagtggagtagtaacccgctcacgttcggtggaggtaccaaggtcgagattaaatcctcgagcgagcccaaatcttctgacaaaactcacacatgcccaccgtgcccagcacctgaactcctgggtggaccgtcagtcttcctcttccccccaaaacccaaggacaccctcatgatctcccggacccctgaggtcacatgcgtggtggtggacgtgagccacgaagaccctgaggtcaagttcaactggtacgtggacggcgtggaggtgcataatgccaagacaaagccgcgggaggagcagtacaacagcacgtaccgtgtggtcagcgtcctcaccgtcctgcaccaggactggctgaatggcaaggagtacaagtgcaaggtctccaacaaagccctcccagcccccatcgagaaaaccatctccaaagccaaagggcagccccgagaaccacaggtgtacaccctgcccccatcccgggatgagctgaccaagaaccaggtcagcctgacctgcctggtcaaaggcttctatccaagcgacatcgccgtggagtgggagagcaatgggcagccggagaacaactacaagaccacgcctcccgtgctggactccgacggctccttcttcctctacagcaagctcaccgtggacaagagcaggtggcagcaggggaacgtcttctcatgctccgtgatgcatgaggctctgcacaaccactacacgcagaagagcctctccctgtctccgggtaaatctagaactgtggctgcaccatctgtcttcatcttcccgccatctgatgagcagttgaaatctggaactgcctctgttgtgtgcctgctgaattacttctatcccagagaggccaaagtacagtggaaggtggataacgccctccaatcgggtaactcccaggagagtgccacagagcaggacagcaaggacagcacctacagcctcagcagcgagctgacgctgagcaaagcagactacgagaaacacaaagtctacgcctgcgaagtcacccatcagggcctgagctcgcccgtcacaaagagcttcaacaggggagagtga

SEQ ID NO: 794 - DNA, 1821 bp, Artificial Sequence
  TSC041 comprises: CRIS7 (anti-CD3) scFv, human IgG1 SCC-P hinge, human IgG1 CH2, human IgG1 CH3, and human Ck(YAE)
atggaagcaccagcgcagcttctcttcctcctgctactctggctcccagataccaccggtcaggtccagctggtgcagtctgggggcggagtggtgcagcctgggcggtcactgaggctgtcctgcaaggcttctggctacacctttactagatctacgatgcactgggtaaggcaggcccctggaaagggtctggaatggattggatacattaatcctagcagtgcttatactaattacaatcagaaattcaaggacaggttcacaatcagcgcagacaaatccaagagcacagccttcctgcagatggacagcctgaggcccgaggacaccggcgtctatttctgtgcacggccccaagtccactatgattacaacgggtttccttactggggccaagggactcccgtcactgtctctagcggtggcggagggtctgggggtggcggatccggaggtggtggctctgcacaagacatccagatgacccagtctccaagcagcctgtctgcaagcgtgggggacagggtcaccatgacctgcagtgccagctcaagtgtaagttacatgaactggtaccagcagaagcccggcaaggcccccaaaagatggatttatgactcatccaaactggcttctggagtccctgctcgcttcagtggcagtgggtctgggaccgactataccctcacaatcagcagcctgcagcccgaagatttcgccacttattactgccagcagtggagtcgtaacccacccacgttcggaggggggaccaagctacaaattacacgctcgagcgagcccaaatcttctgacaaaactcacacatgcccaccgtgcccagcacctgaactcctgggtggaccgtcagtcttcctcttccccccaaaacccaaggacaccctcatgatctcccggacccctgaggtcacatgcgtggtggtggacgtgagccacgaagaccctgaggtcaagttcaactggtacgtggacggcgtggaggtgcataatgccaagacaaagccgcgggaggagcagtacaacagcacgtaccgtgtggtcagcgtcctcaccgtcctgcaccaggactggctgaatggcaaggagtacaagtgcaaggtctccaacaaagccctcccagcccccatcgagaaaaccatctccaaagccaaagggcagccccgagaaccacaggtgtacaccctgcccccatcccgggatgagctgaccaagaaccaggtcagcctgacctgcctggtcaaaggcttctatccaagcgacatcgccgtggagtgggagagcaatgggcagccggagaacaactacaagaccacgcctcccgtgctggactccgacggctccttcttcctctacagcaagctcaccgtggacaagagcaggtggcagcaggggaacgtcttctcatgctccgtgatgcatgaggctctgcacaaccactacacgcagaagagcctctccctgtctccgggtaaatctagaactgtggctgcaccatctgtcttcatcttcccgccatctgatgagcagttgaaatctggaactgcctctgttgtgtgcctgctgaattacttctatcccagagaggccaaagtacagtggaaggtggataacgccctccaatcgggtaactcccaggagagtgccacagagcaggacagcaaggacagcacctacagcctcagcagcgagctgacgctgagcaaagcagactacgagaaacacaaagtctacgcctgcgaagtcacccatcagggcctgagctcgcccgtcacaaagagcttcaacaggggagagtga

SEQ ID NO: 795 - DNA, 1773 bp, Artificial Sequence
  TSC043 comprises: OKT3-M (Micromet variant anti-CD3, see also US 7,635,472) scFv, human IgG1 SCC-P hinge, human IgG1 CH2, human IgG1 CH3, and human Ck(YAE)
atggaagcaccagcgcagcttctcttcctcctgctactctggctcccagataccaccggtgatatcaaactgcagcagtcaggggctgaactggcaagacctggggcctcagtgaagatgtcctgcaagacttctggctacacctttactaggtacacgatgcactgggtaaaacagaggcctggacagggtctggaatggattggatacattaatcctagccgtggttatactaattacaatcagaagttcaaggacaaggccacattgactacagacaaatcctccagcacagcctacatgcaactgagcagcctgacatctgaggactctgcagtctattactgtgcaagatattatgatgatcattactgccttgactactggggccaaggcaccactctcacagtctcctcagtcgaaggtggaagtggaggttctggtggaagtggaggttcaggtggagtcgacgacattcagctgacccagtctccagcaatcatgtctgcatctccaggggagaaggtcaccatgacctgcagagccagttcaagtgtaagttacatgaactggtaccagcagaagtcaggcacctcccccaaaagatggatttatgacacatccaaagtggcttctggagtcccttatcgcttcagtggcagtgggtctgggacctcatactctctcacaatcagcagcatggaggctgaagatgctgccacttattactgccaacagtggagtagctcgagcgagcccaaatcttctgacaaaactcacacatgcccaccgtgcccagcacctgaactcctgggtggaccgtcagtcttcctcttccccccaaaacccaaggacaccctcatgatctcccggacccctgaggtcacatgcgtggtggtggacgtgagccacgaagaccctgaggtcaagttcaactggtacgtggacggcgtggaggtgcataatgccaagacaaagccgcgggaggagcagtacaacagcacgtaccgtgtggtcagcgtcctcaccgtcctgcaccaggactggctgaatggcaaggagtacaagtgcaaggtctccaacaaagccctcccagcccccatcgagaaaaccatctccaaagccaaagggcagccccgagaaccacaggtgtacaccctgcccccatcccgggatgagctgaccaagaaccaggtcagcctgacctgcctggtcaaaggcttctatccaagcgacatcgccgtggagtgggagagcaatgggcagccggagaacaactacaagaccacgcctcccgtgctggactccgacggctccttcttcctctacagcaagctcaccgtggacaagagcaggtggcagcaggggaacgtcttctcatgctccgtgatgcatgaggctctgcacaaccactacacgcagaagagcctctccctgtctccgggtaaatctagaactgtggctgcaccatctgtcttcatcttcccgccatctgatgagcagttgaaatctggaactgcctctgttgtgtgcctgctgaattacttctatcccagagaggccaaagtacagtggaaggtggataacgccctccaatcgggtaactcccaggagagtgccacagagcaggacagcaaggacagcacctacagcctcagcagcgagctgacgctgagcaaagcagactacgagaaacacaaagtctacgcctgcgaagtcacccatcagggcctgagctcgcccgtcacaaagagcttcaacaggggagagtga

SEQ ID NO: 796 - DNA, 2088 bp, Artificial Sequence
  TSC049 comprises: HD37 (anti-CD19) scFv, human IgG1 SCC-P hinge, human IgG1 CH2(ADCC/CDC null), human IgG1 CH3, and human IgG1 CH1
cgaaattaatacgactcactatagggagacccaagcttgccgccatggaagcaccagcgcagcttctcttcctcctgctactctggctcccagataccaccggtgacattgtgctgacccaatctccagcttctttggctgtgtctctagggcagagggccaccatctcctgcaaggccagccaaagtgttgattatgatggtgatagttatttgaactggtaccaacagattccaggacagccacccaaactcctcatctatgatgcatccaatctagtttctgggatcccacccaggtttagtggcagtgggtctgggacagacttcaccctcaacatccatcctgtggagaaggtggatgctgcaacctatcactgccagcaaagtactgaggatccgtggacgttcggtggaggcaccaagctggaaatcaaaggtggcggtggttcgggcggtggtgggtcgggtggcggcggagctagccaggttcagctgcagcagtctggggctgagctggtgaggcctgggtcctcagtgaagatttcctgcaaggcttctggctatgcattcagtagctactggatgaactgggtgaagcagaggcctggacagggtcttgagtggattggacagatttggcctggagatggtgatactaactacaatggaaagttcaagggtaaagccactctgactgcagacgaatcctccagcacagcctacatgcaactcagcagcctagcatctgaggactctgcggtctatttctgtgcaagacgggagactacgacggtaggccgttattactatgctatggactactggggtcaaggaacctcagtcaccgtctcctcgagtgagcccaaatcttctgacaaaactcacacatgcccaccgtgcccagcacctgaagccgcgggtgcaccgtcagtcttcctcttccccccaaaacccaaggacaccctcatgatctcccggacccctgaggtcacatgcgtggtggtggacgtgagccacgaagaccctgaggtcaagttcaactggtacgtggacggcgtggaggtgcataatgccaagacaaagccgcgggaggagcagtacaacagcacgtaccgtgtggtcagcgtcctcaccgtcctgcaccaggactggctgaatggcaaggcgtacgcgtgcgcggtctccaacaaagccctcccagcccccatcgagaaaaccatctccaaagccaaagggcagccccgagaaccacaggtgtacaccctgcccccatcccgggatgagctgaccaagaaccaggtcagcctgacctgcctggtcaaaggcttctatccaagcgacatcgccgtggagtgggagagcaatgggcagccggagaacaactacaagaccacgcctcccgtgctggactccgacggctccttcttcctctacagcaagctcaccgtggacaagagcaggtggcagcaggggaacgtcttctcatgctccgtgatgcatgaggctctgcacaaccactacacgcagaagagcctctccctgtctccgggtaaatctagagcctccaccaagggcccatcggtcttccccctggcaccctcctccaagagcacctctgggggcacagcggccctgggctgcctggtcaaggactacttccccgagccggtgacggtgtcgtggaactcaggcgccctgaccagcggcgtgcacaccttcccggctgtcctacagtcctcaggactctactccctcagcagcgtggtgaccgtgccctccagcagcttgggcacccagacctacatctgcaacgtgaatcacaagcccagcaacaccaaggtggacaagaaagtttgataccactacatatcgcggccgctctagagggccctattctatagtgtcacctaaatgctagagctcgctgatctgcctcgactgtgccttctagttgccagccatctgttgtttgcccctcccccgtgccttccttgaccctggaaggtgccactcccactgtcctttcctaataaaatgaggaaattgcatcgcattgtctgagtaggtgtcattctattctgggggg

SEQ ID NO: 797 - DNA, 2067 bp, Artificial Sequence
  TSC050 comprises: 2H7 (anti-CD20) scFv, human IgG1 SCC-P hinge, human IgG1 CH2(ADCC/CDC null), human IgG1 CH3, and human IgG1 CH1
cgaaattaatacgactcactatagggagacccaagcttgccgccatggaagcaccagcgcagcttctcttcctcctgctactctggctcccagataccaccggtcaaattgttctctcccagtctccagcaatcctgtctgcatctccaggggagaaggtcacaatgacttgcagggccagctcaagtgtaagttacatgcactggtaccagcagaagccaggatcctcccccaaaccctggatttatgccccatccaacctggcttctggagtccctgctcgcttcagtggcagtgggtctgggacctcttactctctcacaatcagcagagtggaggctgaagatgctgccacttattactgccagcagtggagttttaacccacccacgttcggtgctgggaccaagctggagctgaaagatggcggtggctcgggcggtggtggatctggaggaggtggggctagccaggcttatctacagcagtctggggctgagtcggtgaggcctggggcctcagtgaagatgtcctgcaaggcttctggctacacatttaccagttacaatatgcactgggtaaagcagacacctagacagggcctggaatggattggagctatttatccaggaaatggtgatacttcctacaatcagaagttcaagggcaaggccacactgactgtagacaaatcctccagcacagcctacatgcagctcagcagcctgacatctgaagactctgcggtctatttctgtgcaagagtggtgtactatagtaactcttactggtacttcgatgtctggggcacagggaccacggtcaccgtctcctcgagcgagcccaaatcttctgacaaaactcacacatgcccaccgtgcccagcacctgaagccgcgggtgcaccgtcagtcttcctcttccccccaaaacccaaggacaccctcatgatctcccggacccctgaggtcacatgcgtggtggtggacgtgagccacgaagaccctgaggtcaagttcaactggtacgtggacggcgtggaggtgcataatgccaagacaaagccgcgggaggagcagtacaacagcacgtaccgtgtggtcagcgtcctcaccgtcctgcaccaggactggctgaatggcaaggcgtacgcgtgcgcggtctccaacaaagccctcccagcccccatcgagaaaaccatctccaaagccaaagggcagccccgagaaccacaggtgtacaccctgcccccatcccgggatgagctgaccaagaaccaggtcagcctgacctgcctggtcaaaggcttctatccaagcgacatcgccgtggagtgggagagcaatgggcagccggagaacaactacaagaccacgcctcccgtgctggactccgacggctccttcttcctctacagcaagctcaccgtggacaagagcaggtggcagcaggggaacgtcttctcatgctccgtgatgcatgaggctctgcacaaccactacacgcagaagagcctctccctgtctccgggtaaatctagagcctccaccaagggcccatcggtcttccccctggcaccctcctccaagagcacctctgggggcacagcggccctgggctgcctggtcaaggactacttccccgagccggtgacggtgtcgtggaactcaggcgccctgaccagcggcgtgcacaccttcccggctgtcctacagtcctcaggactctactccctcagcagcgtggtgaccgtgccctccagcagcttgggcacccagacctacatctgcaacgtgaatcacaagcccagcaacaccaaggtggacaagaaagtttgataccactacatatcgcggccgctctagagggccctattctatagtgtcacctaaatgctagagctcgctgatctgcctcgactgtgccttctagttgccagccatctgttgtttgcccctcccccgtgccttccttgaccctggaaggtgccactcccactgtcctttcctaataaaatgaggaaattgcatcgcattgtctgagtaggtgtcattctattctgggggg

SEQ ID NO: 798 - DNA, 2055 bp, Artificial Sequence
  TSC051 comprises: P2C2 (anti-CD79) scFv, human IgG1 SCC-P hinge, human IgG1 CH2(ADCC/CDC null), human IgG1 CH3, and human IgG1 CH1
cgaaattaatacgactcactatagggagacccaagcttgccgccatggaagcaccagcgcagcttctcttcctcctgctactctggctcccagataccaccggtgatattgtgatgatccaggatgaactctccaatcctgtcagttctggagaatcagtttccatctcctgtaggtctagtaagagtctcctagataaggaagggaagacatacttgaattggtttctgcagagaccaggacaatctcctcagctcctgatctatctgatgtccatgcgtgaatcaggagtctcagaccggtttagtggcagtgggtcaggaacagatttcaccctggaaatcagtagagtgaaggctgaggatgtgggtgtgtattactgtcaacaacttgtagagtatccgtggacgttcggtggaggcaccaagctggaaatcaaaggtggcggtggctctggcggaggtggatccggtggcggcggctctcagatccagttggtgcagtctggacctgagctgaagaagcctggagagacagtcaagatctcctgcaaggcttctggttataccttcacagacttttcaatgcactgggtgaggcaggctccaggaaagggtttaaagtggatgggctggataaacactgagactggtgagccaacatatgcagatgacttcaggggacggtttgccttctctttggaaacttctgccagcactgcctatttgcagatcaacaacctcaaaaatgaggacacggctacatatttttgtacctggtctgcttactggggccaagggactctggtcactgtctctgcctcgagcgagcccaaatcttctgacaaaactcacacatgcccaccgtgcccagcacctgaagccgcgggtgcaccgtcagtcttcctcttccccccaaaacccaaggacaccctcatgatctcccggacccctgaggtcacatgcgtggtggtggacgtgagccacgaagaccctgaggtcaagttcaactggtacgtggacggcgtggaggtgcataatgccaagacaaagccgcgggaggagcagtacaacagcacgtaccgtgtggtcagcgtcctcaccgtcctgcaccaggactggctgaatggcaaggcgtacgcgtgcgcggtctccaacaaagccctcccagcccccatcgagaaaaccatctccaaagccaaagggcagccccgagaaccacaggtgtacaccctgcccccatcccgggatgagctgaccaagaaccaggtcagcctgacctgcctggtcaaaggcttctatccaagcgacatcgccgtggagtgggagagcaatgggcagccggagaacaactacaagaccacgcctcccgtgctggactccgacggctccttcttcctctacagcaagctcaccgtggacaagagcaggtggcagcaggggaacgtcttctcatgctccgtgatgcatgaggctctgcacaaccactacacgcagaagagcctctccctgtctccgggtaaatctagagcctccaccaagggcccatcggtcttccccctggcaccctcctccaagagcacctctgggggcacagcggccctgggctgcctggtcaaggactacttccccgagccggtgacggtgtcgtggaactcaggcgccctgaccagcggcgtgcacaccttcccggctgtcctacagtcctcaggactctactccctcagcagcgtggtgaccgtgccctccagcagcttgggcacccagacctacatctgcaacgtgaatcacaagcccagcaacaccaaggtggacaagaaagtttgataccactacatatcgcggccgctctagagggccctattctatagtgtcacctaaatgctagagctcgctgatctgcctcgactgtgccttctagttgccagccatctgttgtttgcccctcccccgtgccttccttgaccctggaaggtgccactcccactgtcctttcctaataaaatgaggaaattgcatcgcattgtctgagtaggtgtcattctattctgggggg

SEQ ID NO: 799 - DNA, 1870 bp, Artificial Sequence
  TSC052 comprises: 5D5 (anti-cMet) scFv, human IgG1 SCC-P hinge, human IgG1 CH2(ADCC/CDC null), human IgG1 CH3, and human IgG1 CH1
cttatcgaattaatacgactcactatagggagacccaagcttgccgccatggaagcaccagcgcagcttctcttcctcctgctactctggctcccagataccaccggtgactttatgatgtcacagtctccatcctccctaactgtgtcagttggagagaaggttactgtgagctgcaagtccagtcagtcccttttatatactagcagtcagaagaactacttggcctggtaccagcagaaaccaggtcagtctcctaaactgctgatttactgggcatccactagggaatctggggtccctgatcgcttcacaggcagtggatctgggacagatttcactctcaccatcaccagtgtgaaggctgacgacctggcagtttattactgtcagcaatattatgcctatccgtggacgttcggtggaggcaccaagttggagctcaaaggtggcggtggctctggcggaggtggatccggtggcggcggctctcaggtccaactgcagcagtctgggcctgagctggtgaggcctggggcttcagtgaagatgtcctgcagggcttcgggctataccttcaccagctactggttgcactgggttaaacagaggcctggacaaggccttgagtggattggcatgattgatccttccaatagtgacactaggtttaatccgaacttcaaggacaaggccacattgaatgtagacagatcttccaacacagcctacatgctgctcagcagcctgacatctgctgactctgcagtctattactgtgccacatatggtagctacgtttcccctctggactactggggtcaaggaacctcagtcaccgtctcctcgagcgagcccaaatcttctgacaaaactcacacatgcccaccgtgcccagcacctgaagccgcgggtgcaccgtcagtcttcctcttccccccaaaacccaaggacaccctcatgatctcccggacccctgaggtcacatgcgtggtggtggacgtgagccacgaagaccctgaggtcaagttcaactggtacgtggacggcgtggaggtgcataatgccaagacaaagccgcgggaggagcagtacaacagcacgtaccgtgtggtcagcgtcctcaccgtcctgcaccaggactggctgaatggcaaggcgtacgcgtgcgcggtctccaacaaagccctcccagcccccatcgagaaaaccatctccaaagccaaagggcagccccgagaaccacaggtgtacaccctgcccccatcccgggatgagctgaccaagaaccaggtcagcctgacctgcctggtcaaaggcttctatccaagcgacatcgccgtggagtgggagagcaatgggcagccggagaacaactacaagaccacgcctcccgtgctggactccgacggctccttcttcctctacagcaagctcaccgtggacaagagcaggtggcagcaggggaacgtcttctcatgctccgtgatgcatgaggctctgcacaaccactacacgcagaagagcctctccctgtctccgggtaaatctagagcctccaccaagggcccatcggtcttccccctggcaccctcctccaagagcacctctgggggcacagcggccctgggctgcctggtcaaggactacttccccgagccggtgacggtgtcgtggaactcaggcgccctgaccagcggcgtgcacaccttcccggctgtcctacagtcctcaggactctactccctcagcagcgtggtgaccgtgccctccagcagcttgggcacccagacctacatctgcaacgtgaatcacaagcccagcaacaccaaggtggacaagaaagtttgataccactacatatcgcggc

SEQ ID NO: 800 - DNA, 1827 bp, Artificial Sequence
  TSC053 comprises: G19-4 (anti CD3) scFv, human IgG1 SCC-P hinge, human IgG1 CH2(ADCC/CDC null), human IgG1 CH3, and human Ck(YAE)
atggaagcaccagcgcagcttctcttcctcctgctactctggctcccagataccaccggtgaggtccagctgcaacagtctggacctgaactggtgaagcctggagcttcaatgaagatttcctgcaaggcctctggttactcattcactggctacatcgtgaactggctgaagcagagccatggaaagaaccttgagtggattggacttattaatccatacaaaggtcttactacctacaaccagaaattcaagggcaaggccacattaactgtagacaagtcatccagcacagcctacatggagctcctcagtctgacatctgaagactctgcagtctattactgtgcaagatctgggtactatggtgactcggactggtacttcgatgtctggggcgcagggaccacggtcaccgtctcaagcggtggcggagggtctgggggtggcggatccggaggtggtggctctgcacaagacatccagatgacacagactacatcctccctgtctgcctctctgggagacagagtcaccatcagttgcagggcaagtcaggacattcgcaattatttaaactggtatcagcagaaaccagatggaactgttaaactcctgatctactacacatcaagattacactcaggagtcccatcaaggttcagtggcagtgggtctggaacagattattctctcaccattgccaacctgcaaccagaagatattgccacttacttttgccaacagggtaatacgcttccgtggacgttcggtggaggcaccaaactggtaaccaaacgctcgagcgagcccaaatcttctgacaaaactcacacatgcccaccgtgcccagcacctgaagccgcgggtgcaccgtcagtcttcctcttccccccaaaacccaaggacaccctcatgatctcccggacccctgaggtcacatgcgtggtggtggacgtgagccacgaagaccctgaggtcaagttcaactggtacgtggacggcgtggaggtgcataatgccaagacaaagccgcgggaggagcagtacaacagcacgtaccgtgtggtcagcgtcctcaccgtcctgcaccaggactggctgaatggcaaggcgtacgcgtgcgcggtctccaacaaagccctcccagcccccatcgagaaaaccatctccaaagccaaagggcagccccgagaaccacaggtgtacaccctgcccccatcccgggatgagctgaccaagaaccaggtcagcctgacctgcctggtcaaaggcttctatccaagcgacatcgccgtggagtgggagagcaatgggcagccggagaacaactacaagaccacgcctcccgtgctggactccgacggctccttcttcctctacagcaagctcaccgtggacaagagcaggtggcagcaggggaacgtcttctcatgctccgtgatgcatgaggctctgcacaaccactacacgcagaagagcctctccctgtctccgggtaaatctagaactgtggctgcaccatctgtcttcatcttcccgccatctgatgagcagttgaaatctggaactgcctctgttgtgtgcctgctgaattacttctatcccagagaggccaaagtacagtggaaggtggataacgccctccaatcgggtaactcccaggagagtgccacagagcaggacagcaaggacagcacctacagcctcagcagcgagctgacgctgagcaaagcagactacgagaaacacaaagtctacgcctgcgaagtcacccatcagggcctgagctcgcccgtcacaaagagcttcaacaggggagagtga

SEQ ID NO: 801 - DNA, 2707 bp, Artificial Sequence
  TSC064 comprises: G19-4 (anti-CD3) scFv, human IgG1 SCC-P hinge, human IgG1 CH2, human IgG1 CH3, human Ck(YAE), H75 linker, and Met021 (anti-c-Met) scFv
atacgactcactatagggagacccaagcttgccgccatggaagcaccagcgcagcttctcttcctcctgctactctggctcccagataccaccggtgaggtccagctgcaacagtctggacctgaactggtgaagcctggagcttcaatgaagatttcctgcaaggcctctggttactcattcactggctacatcgtgaactggctgaagcagagccatggaaagaaccttgagtggattggacttattaatccatacaaaggtcttactacctacaaccagaaattcaagggcaaggccacattaactgtagacaagtcatccagcacagcctacatggagctcctcagtctgacatctgaagactctgcagtctattactgtgcaagatctgggtactatggtgactcggactggtacttcgatgtctggggcgcagggaccacggtcaccgtctcaagcggtggcggagggtctgggggtggcggatccggaggtggtggctctgcacaagacatccagatgacacagactacatcctccctgtctgcctctctgggagacagagtcaccatcagttgcagggcaagtcaggacattcgcaattatttaaactggtatcagcagaaaccagatggaactgttaaactcctgatctactacacatcaagattacactcaggagtcccatcaaggttcagtggcagtgggtctggaacagattattctctcaccattgccaacctgcaaccagaagatattgccacttacttttgccaacagggtaatacgcttccgtggacgttcggtggaggcaccaaactggtaaccaaacgctcgagcgagcccaaatcttctgacaaaactcacacatgcccaccgtgcccagcacctgaactcctgggtggaccgtcagtcttcctcttccccccaaaacccaaggacaccctcatgatctcccggacccctgaggtcacatgcgtggtggtggacgtgagccacgaagaccctgaggtcaagttcaactggtacgtggacggcgtggaggtgcataatgccaagacaaagccgcgggaggagcagtacaacagcacgtaccgtgtggtcagcgtcctcaccgtcctgcaccaggactggctgaatggcaaggagtacaagtgcaaggtctccaacaaagccctcccagcccccatcgagaaaaccatctccaaagccaaagggcagccccgagaaccacaggtgtacaccctgcccccatcccgggatgagctgaccaagaaccaggtcagcctgacctgcctggtcaaaggcttctatccaagcgacatcgccgtggagtgggagagcaatgggcagccggagaacaactacaagaccacgcctcccgtgctggactccgacggctccttcttcctctacagcaagctcaccgtggacaagagcaggtggcagcaggggaacgtcttctcatgctccgtgatgcatgaggctctgcacaaccactacacgcagaagagcctctccctgtctccgggtaaatctagaactgtggctgcaccatctgtcttcatcttcccgccatctgatgagcagttgaaatctggaactgcctctgttgtgtgcctgctgaattacttctatcccagagaggccaaagtacagtggaaggtggataacgccctccaatcgggtaactcccaggagagtgccacagagcaggacagcaaggacagcacctacagcctcagcagcgagctgacgctgagcaaagcagactacgagaaacacaaagtctacgcctgcgaagtcacccatcagggcctgagctcgcccgtcacaaagagcttcaacaggggagagcagaggcacaacaattcttccctgaatacaggaactcagatggcaggtcattctccgaattctgacatccagatgacccagtctccatcctccctgtctgcatctgtaggagacagagtcaccatcacttgtcgggcaagtcagagcattaggaactatttaaattggtatcagcaggaaccagggaaagcccctaagctcctgatctatgctgcatccagtttgcaaagtggggtcccatcaaggttcagtggcagtggatctgggacagacttcattctcaccatcagcagtctgcagcctgaagattttgcaacttactactgtcaacagagttacgttaccccgctcactttcggcggagggaccaaggtggagatcaaagggggtggaggctctggtggcggtggctctggcggaggtggatccggtggcggcggctctgaagttcaattgttagagtctggtggcggtcttgttcagcctggtggttctttacgtctttcttgcgctgcttccggattcactttctctaagtacgatatgctttgggttcgccaagctcctggtaaaggtttggagtgggtttcttatatctatccttctggtggccttactgagtatgctgactccgttaaaggtcgcttcactatctctagagacaactctaagaatactctctacttgcagatgaacagcttaagggctgaggacacggccgtgtattactgtgcgagacgggctccccggtccctttcttttgatatctggggccaagggacaatggtcaccgtctaagcggccgctctagagggccctattctatagtgtcacctaaatgctagag

SEQ ID NO: 802 - DNA, 1812 bp, Artificial Sequence
  TSC076 comprises: OKT3 (anti-CD3) scFv, human IgG1 SCC-P hinge, human IgG1 CH2(ADCC/CDC null), human IgG1 CH3, and human Ck(YAE)
atggaagcaccagcgcagcttctcttcctcctgctactctggctcccagataccaccggtcaggtccagctgcagcagtctggggctgaactggcaagacctggggcctcagtgaagatgtcctgcaaggcttctggctacacctttactaggtacacgatgcactgggtaaaacagaggcctggacagggtctggaatggattggatacattaatcctagccgtggttatactaattacaatcagaagttcaaggacaaggccacattgactacagacaaatcctccagcacagcctacatgcaactgagcagcctgacatctgaggactctgcagtctattactgtgcaagatattatgatgatcattactgccttgactactggggccaaggcaccacggtcaccgtctcaagcggtggcggagggtctgggggtggcggatccggaggtggtggctctgcacaacaaattgttctcacccagtctccagcaatcatgtctgcatctccaggggagaaggtcaccatgacctgcagtgccagctcaagtgtaagttacatgaactggtaccagcagaagtcaggcacctcccccaaaagatggatttatgacacatccaaactggcttctggagtccctgctcacttcaggggcagtgggtctgggacctcttactctctcacaatcagcggcatggaggctgaagatgctgccacttattactgccagcagtggagtagtaacccattcacgttcggctcggggacaaagttggaaataaactcgagtgagcccaaatcttctgacaaaactcacacatgcccaccgtgcccagcacctgaagccgcgggtgcaccgtcagtcttcctcttccccccaaaacccaaggacaccctcatgatctcccggacccctgaggtcacatgcgtggtggtggacgtgagccacgaagaccctgaggtcaagttcaactggtacgtggacggcgtggaggtgcataatgccaagacaaagccgcgggaggagcagtacaacagcacgtaccgtgtggtcagcgtcctcaccgtcctgcaccaggactggctgaatggcaaggcgtacgcgtgcgcggtctccaacaaagccctcccagcccccatcgagaaaaccatctccaaagccaaagggcagccccgagaaccacaggtgtacaccctgcccccatcccgggatgagctgaccaagaaccaggtcagcctgacctgcctggtcaaaggcttctatccaagcgacatcgccgtggagtgggagagcaatgggcagccggagaacaactacaagaccacgcctcccgtgctggactccgacggctccttcttcctctacagcaagctcaccgtggacaagagcaggtggcagcaggggaacgtcttctcatgctccgtgatgcatgaggctctgcacaaccactacacgcagaagagcctctccctgtctccgggtaaatctagaactgtggctgcaccatctgtcttcatcttcccgccatctgatgagcagttgaaatctggaactgcctctgttgtgtgcctgctgaattacttctatcccagagaggccaaagtacagtggaaggtggataacgccctccaatcgggtaactcccaggagagtgccacagagcaggacagcaaggacagcacctacagcctcagcagcgagctgacgctgagcaaagcagactacgagaaacacaaagtctacgcctgcgaagtcacccatcagggcctgagctcgcccgtcacaaagagcttcaacaggggagagtga

SEQ ID NO: 803 - DNA, 1821 bp, Artificial Sequence
  TSC077 comprises: HuM291 (anti-CD3) scFv, human IgG1 SCC-P hinge, human IgG1 CH2(ADCC/CDC null), human IgG1 CH3, and human Ck(YAE)
atggaagcaccagcgcagcttctcttcctcctgctactctggctcccagataccaccggtcaggtccagcttgtccagtctggggctgaagtcaagaaacctggcgccagcgtgaaggtctcctgcaaggcttctggctacacctttattagttacacgatgcattgggtaaggcaggcccctggacagggtctggaatggatgggatatattaatccgagaagtgggtatactcattacaatcagaagttaaaggacaaggcaacacttaccgcggacaaatccgcgagcacagcctacatggaactgagcagcctgagatctgaggacaccgcagtctattactgtgcaagatcggcctactatgattatgacggctttgcttactggggccaaggaaccctggtcaccgtctcaagcggtggcggagggtctgggggtggcggatccggaggtggtggctctgcacaagatattcagatgacccagtctccatcttccctctctgctagcgtcggggatagggtcaccataacctgctctgccagctcaagtgtaagttacatgaactggtaccagcagaagccaggcaaagctcccaagagactaatttatgacacatccaaactggcttctggagtcccttctaggttcagtggcagtggatctgggaccgatttcaccctcacaatcagctctctgcagccagaagatttcgccacttattactgccagcaatggagtagtaacccacccacgttcggtggagggaccaaggtggagatcaaacgaacctcgagtgagcccaaatcttctgacaaaactcacacatgcccaccgtgcccagcacctgaagccgcgggtgcaccgtcagtcttcctcttccccccaaaacccaaggacaccctcatgatctcccggacccctgaggtcacatgcgtggtggtggacgtgagccacgaagaccctgaggtcaagttcaactggtacgtggacggcgtggaggtgcataatgccaagacaaagccgcgggaggagcagtacaacagcacgtaccgtgtggtcagcgtcctcaccgtcctgcaccaggactggctgaatggcaaggcgtacgcgtgcgcggtctccaacaaagccctcccagcccccatcgagaaaaccatctccaaagccaaagggcagccccgagaaccacaggtgtacaccctgcccccatcccgggatgagctgaccaagaaccaggtcagcctgacctgcctggtcaaaggcttctatccaagcgacatcgccgtggagtgggagagcaatgggcagccggagaacaactacaagaccacgcctcccgtgctggactccgacggctccttcttcctctacagcaagctcaccgtggacaagagcaggtggcagcaggggaacgtcttctcatgctccgtgatgcatgaggctctgcacaaccactacacgcagaagagcctctccctgtctccgggtaaatctagaactgtggctgcaccatctgtcttcatcttcccgccatctgatgagcagttgaaatctggaactgcctctgttgtgtgcctgctgaattacttctatcccagagaggccaaagtacagtggaaggtggataacgccctccaatcgggtaactcccaggagagtgccacagagcaggacagcaaggacagcacctacagcctcagcagcgagctgacgctgagcaaagcagactacgagaaacacaaagtctacgcctgcgaagtcacccatcagggcctgagctcgcccgtcacaaagagcttcaacaggggagagtga

SEQ ID NO: 804 - DNA, 1821 bp, Artificial Sequence
  TSC093 comprises from its amino to carboxy terminus: CRIS7 (anti-CD3) scFv, human IgG1 SCC-P hinge, human IgG1 CH2(ADCC/CDC null), human IgG1 CH3, and human Ck(YAE)
atggaagcaccagcgcagcttctcttcctcctgctactctggctcccagataccaccggtcaggtccagctggtgcagtctgggggcggagtggtgcagcctgggcggtcactgaggctgtcctgcaaggcttctggctacacctttactagatctacgatgcactgggtaaggcaggcccctggaaagggtctggaatggattggatacattaatcctagcagtgcttatactaattacaatcagaaattcaaggacaggttcacaatcagcgcagacaaatccaagagcacagccttcctgcagatggacagcctgaggcccgaggacaccggcgtctatttctgtgcacggccccaagtccactatgattacaacgggtttccttactggggccaagggactcccgtcactgtctctagcggtggcggagggtctgggggtggcggatccggaggtggtggctctgcacaagacatccagatgacccagtctccaagcagcctgtctgcaagcgtgggggacagggtcaccatgacctgcagtgccagctcaagtgtaagttacatgaactggtaccagcagaagcccggcaaggcccccaaaagatggatttatgactcatccaaactggcttctggagtccctgctcgcttcagtggcagtgggtctgggaccgactataccctcacaatcagcagcctgcagcccgaagatttcgccacttattactgccagcagtggagtcgtaacccacccacgttcggaggggggaccaagctacaaattacacgctcgagtgagcccaaatcttctgacaaaactcacacatgcccaccgtgcccagcacctgaagccgcgggtgcaccgtcagtcttcctcttccccccaaaacccaaggacaccctcatgatctcccggacccctgaggtcacatgcgtggtggtggacgtgagccacgaagaccctgaggtcaagttcaactggtacgtggacggcgtggaggtgcataatgccaagacaaagccgcgggaggagcagtacaacagcacgtaccgtgtggtcagcgtcctcaccgtcctgcaccaggactggctgaatggcaaggcgtacgcgtgcgcggtctccaacaaagccctcccagcccccatcgagaaaaccatctccaaagccaaagggcagccccgagaaccacaggtgtacaccctgcccccatcccgggatgagctgaccaagaaccaggtcagcctgacctgcctggtcaaaggcttctatccaagcgacatcgccgtggagtgggagagcaatgggcagccggagaacaactacaagaccacgcctcccgtgctggactccgacggctccttcttcctctacagcaagctcaccgtggacaagagcaggtggcagcaggggaacgtcttctcatgctccgtgatgcatgaggctctgcacaaccactacacgcagaagagcctctccctgtctccgggtaaatctagaactgtggctgcaccatctgtcttcatcttcccgccatctgatgagcagttgaaatctggaactgcctctgttgtgtgcctgctgaattacttctatcccagagaggccaaagtacagtggaaggtggataacgccctccaatcgggtaactcccaggagagtgccacagagcaggacagcaaggacagcacctacagcctcagcagcgagctgacgctgagcaaagcagactacgagaaacacaaagtctacgcctgcgaagtcacccatcagggcctgagctcgcccgtcacaaagagcttcaacaggggagagtga

SEQ ID NO: 805 - DNA, 1773 bp, Artificial Sequence
  TSC094 comprises: OKT3-M (Micromet variant anti-CD3) scFv, human IgG1 SCC-P hinge, human IgG1 CH2(ADCC/CDC null), human IgG1 CH3, human Ck(YAE)
atggaagcaccagcgcagcttctcttcctcctgctactctggctcccagataccaccggtgatatcaaactgcagcagtcaggggctgaactggcaagacctggggcctcagtgaagatgtcctgcaagacttctggctacacctttactaggtacacgatgcactgggtaaaacagaggcctggacagggtctggaatggattggatacattaatcctagccgtggttatactaattacaatcagaagttcaaggacaaggccacattgactacagacaaatcctccagcacagcctacatgcaactgagcagcctgacatctgaggactctgcagtctattactgtgcaagatattatgatgatcattactgccttgactactggggccaaggcaccactctcacagtctcctcagtcgaaggtggaagtggaggttctggtggaagtggaggttcaggtggagtcgacgacattcagctgacccagtctccagcaatcatgtctgcatctccaggggagaaggtcaccatgacctgcagagccagttcaagtgtaagttacatgaactggtaccagcagaagtcaggcacctcccccaaaagatggatttatgacacatccaaagtggcttctggagtcccttatcgcttcagtggcagtgggtctgggacctcatactctctcacaatcagcagcatggaggctgaagatgctgccacttattactgccaacagtggagtagctcgagtgagcccaaatcttctgacaaaactcacacatgcccaccgtgcccagcacctgaagccgcgggtgcaccgtcagtcttcctcttccccccaaaacccaaggacaccctcatgatctcccggacccctgaggtcacatgcgtggtggtggacgtgagccacgaagaccctgaggtcaagttcaactggtacgtggacggcgtggaggtgcataatgccaagacaaagccgcgggaggagcagtacaacagcacgtaccgtgtggtcagcgtcctcaccgtcctgcaccaggactggctgaatggcaaggcgtacgcgtgcgcggtctccaacaaagccctcccagcccccatcgagaaaaccatctccaaagccaaagggcagccccgagaaccacaggtgtacaccctgcccccatcccgggatgagctgaccaagaaccaggtcagcctgacctgcctggtcaaaggcttctatccaagcgacatcgccgtggagtgggagagcaatgggcagccggagaacaactacaagaccacgcctcccgtgctggactccgacggctccttcttcctctacagcaagctcaccgtggacaagagcaggtggcagcaggggaacgtcttctcatgctccgtgatgcatgaggctctgcacaaccactacacgcagaagagcctctccctgtctccgggtaaatctagaactgtggctgcaccatctgtcttcatcttcccgccatctgatgagcagttgaaatctggaactgcctctgttgtgtgcctgctgaattacttctatcccagagaggccaaagtacagtggaaggtggataacgccctccaatcgggtaactcccaggagagtgccacagagcaggacagcaaggacagcacctacagcctcagcagcgagctgacgctgagcaaagcagactacgagaaacacaaagtctacgcctgcgaagtcacccatcagggcctgagctcgcccgtcacaaagagcttcaacaggggagagtga

SEQ ID NO: 806 - DNA, 1821 bp, Artificial Sequence
  TSC095 comprises: BMA031 (anti-TCR) scFv, human IgG1 SCC-P hinge, human IgG1 CH2(ADCC/CDC null), human IgG1 CH3, human Ck(YAE)
atggaagcaccagcgcagcttctcttcctcctgctactctggctcccagataccaccggtggacaggtccaactagttcagtctggagcagaggttaagaagcctgggagctcagtgaaggtttcctgcaaggcttccggatataaattcactagctatgttatgcactgggtgaagcaggcacctggccaggggctcgagtggattggatatattaatccttacaatgatgttactaagtacaatgagaagttcaaaggcaaggccacacttacggccgacgagtccactaatacagcctacatggagctgagcagcctgagatctgaggacactgcggtccattactgtgcaagagggagctactatgattacgacgggtttgtttactggggccaaggtaccctggtcaccgtctcaagcggtggcggagggtctgggggtggcggatccggaggtggtggctctgcacaagatatccagatgacccaatctccatcgaccctgagtgcatctgtcggggacagagtcaccatgacctgcagtgccacctcaagtgtaagttacatgcactggtatcagcagaagcccgggaaggctcccaaaagatggatctatgacacatccaaactggcttctggagtccctgcgcgcttcattggcagtgggtctgggaccgagttcacgctcacaatcagcagcctgcagccagatgatttcgctacgtattactgccagcagtggagtagtaacccgctcacgttcggtggaggtaccaaggtcgagattaaatcctcgagtgagcccaaatcttctgacaaaactcacacatgcccaccgtgcccagcacctgaagccgcgggtgcaccgtcagtcttcctcttccccccaaaacccaaggacaccctcatgatctcccggacccctgaggtcacatgcgtggtggtggacgtgagccacgaagaccctgaggtcaagttcaactggtacgtggacggcgtggaggtgcataatgccaagacaaagccgcgggaggagcagtacaacagcacgtaccgtgtggtcagcgtcctcaccgtcctgcaccaggactggctgaatggcaaggcgtacgcgtgcgcggtctccaacaaagccctcccagcccccatcgagaaaaccatctccaaagccaaagggcagccccgagaaccacaggtgtacaccctgcccccatcccgggatgagctgaccaagaaccaggtcagcctgacctgcctggtcaaaggcttctatccaagcgacatcgccgtggagtgggagagcaatgggcagccggagaacaactacaagaccacgcctcccgtgctggactccgacggctccttcttcctctacagcaagctcaccgtggacaagagcaggtggcagcaggggaacgtcttctcatgctccgtgatgcatgaggctctgcacaaccactacacgcagaagagcctctccctgtctccgggtaaatctagaactgtggctgcaccatctgtcttcatcttcccgccatctgatgagcagttgaaatctggaactgcctctgttgtgtgcctgctgaattacttctatcccagagaggccaaagtacagtggaaggtggataacgccctccaatcgggtaactcccaggagagtgccacagagcaggacagcaaggacagcacctacagcctcagcagcgagctgacgctgagcaaagcagactacgagaaacacaaagtctacgcctgcgaagtcacccatcagggcctgagctcgcccgtcacaaagagcttcaacaggggagagtga

SEQ ID NO: 807 - DNA, 1836 bp, Artificial Sequence
  TSC096 comprises: HD37 (anti-CD19) scFv, human IgG1 SCC-P hinge, human IgG1 CH2 (ADCC/CDC null), human IgG1 CH3, human Ck(YAE)
atggaagcaccagcgcagcttctcttcctcctgctactctggctcccagataccaccggtgacattgtgctgacccaatctccagcttctttggctgtgtctctagggcagagggccaccatctcctgcaaggccagccaaagtgttgattatgatggtgatagttatttgaactggtaccaacagattccaggacagccacccaaactcctcatctatgatgcatccaatctagtttctgggatcccacccaggtttagtggcagtgggtctgggacagacttcaccctcaacatccatcctgtggagaaggtggatgctgcaacctatcactgccagcaaagtactgaggatccgtggacgttcggtggaggcaccaagctggaaatcaaaggtggcggtggttcgggcggtggtgggtcgggtggcggcggagctagccaggttcagctgcagcagtctggggctgagctggtgaggcctgggtcctcagtgaagatttcctgcaaggcttctggctatgcattcagtagctactggatgaactgggtgaagcagaggcctggacagggtcttgagtggattggacagatttggcctggagatggtgatactaactacaatggaaagttcaagggtaaagccactctgactgcagacgaatcctccagcacagcctacatgcaactcagcagcctagcatctgaggactctgcggtctatttctgtgcaagacgggagactacgacggtaggccgttattactatgctatggactactggggtcaaggaacctcagtcaccgtctcctcgagtgagcccaaatcttctgacaaaactcacacatgcccaccgtgcccagcacctgaagccgcgggtgcaccgtcagtcttcctcttccccccaaaacccaaggacaccctcatgatctcccggacccctgaggtcacatgcgtggtggtggacgtgagccacgaagaccctgaggtcaagttcaactggtacgtggacggcgtggaggtgcataatgccaagacaaagccgcgggaggagcagtacaacagcacgtaccgtgtggtcagcgtcctcaccgtcctgcaccaggactggctgaatggcaaggcgtacgcgtgcgcggtctccaacaaagccctcccagcccccatcgagaaaaccatctccaaagccaaagggcagccccgagaaccacaggtgtacaccctgcccccatcccgggatgagctgaccaagaaccaggtcagcctgacctgcctggtcaaaggcttctatccaagcgacatcgccgtggagtgggagagcaatgggcagccggagaacaactacaagaccacgcctcccgtgctggactccgacggctccttcttcctctacagcaagctcaccgtggacaagagcaggtggcagcaggggaacgtcttctcatgctccgtgatgcatgaggctctgcacaaccactacacgcagaagagcctctccctgtctccgggtaaatctagaactgtggctgcaccatctgtcttcatcttcccgccatctgatgagcagttgaaatctggaactgcctctgttgtgtgcctgctgaattacttctatcccagagaggccaaagtacagtggaaggtggataacgccctccaatcgggtaactcccaggagagtgccacagagcaggacagcaaggacagcacctacagcctcagcagcgagctgacgctgagcaaagcagactacgagaaacacaaagtctacgcctgcgaagtcacccatcagggcctgagctcgcccgtcacaaagagcttcaacaggggagagtga

SEQ ID NO: 808 - DNA, 1812 bp, Artificial Sequence
  TSC097 comprises: 4C04 (anti-RON) scFv, human IgG1 SCC-P hinge, human IgG1 CH2(ADCC/CDC null), human IgG1 CH3, and human Ck(YAE)
atggaagcaccagcgcagcttctcttcctcctgctactctggctcccagataccaccggtgacattcagatgacccagtctcctgcctcccagtctgcatctctgggagaaagtgtcaccatcacatgcctggcaagtcagaccattggtacatggttagcatggtatcagcagaaaccagggaaatctcctcagctcctgatttatgctgcaaccagcttggcagatggggtcccatcaaggttcagtgctagtggatctggcacaaaattttctttcaagatcgacagcctacagtctgaagattttgtaagttattactgtcaacaactttacaatactccgtggacgttcggtggaggcaccaagctggaaatcaaaggtggcggtggctctggcggaggtggatccggtggcggcggctctcagatccagctgcagcagtctggacctgagctggtgaagcctgggacttcagtgaagatatcctgcaaggcttctgactacacactcactgacttctatatgaactgggtgaggcagaagcctggacagggacttgagtggattgggaggatttatcctggaaccgataaaactagatacaatgagaaattcagggacaaggccatactgaccgtggacacgtcctccagcacagcctacatgcagctcagcagcctgacatcagaggacactgctgtctatttctgtgcaagatccgcctactatggtaactacgttgctatggactactggggtcaaggaacctcagtcaccgtctcctcgagtgagcccaaatcttctgacaaaactcacacatgcccaccgtgcccagcacctgaagccgcgggtgcaccgtcagtcttcctcttccccccaaaacccaaggacaccctcatgatctcccggacccctgaggtcacatgcgtggtggtggacgtgagccacgaagaccctgaggtcaagttcaactggtacgtggacggcgtggaggtgcataatgccaagacaaagccgcgggaggagcagtacaacagcacgtaccgtgtggtcagcgtcctcaccgtcctgcaccaggactggctgaatggcaaggcgtacgcgtgcgcggtctccaacaaagccctcccagcccccatcgagaaaaccatctccaaagccaaagggcagccccgagaaccacaggtgtacaccctgcccccatcccgggatgagctgaccaagaaccaggtcagcctgacctgcctggtcaaaggcttctatccaagcgacatcgccgtggagtgggagagcaatgggcagccggagaacaactacaagaccacgcctcccgtgctggactccgacggctccttcttcctctacagcaagctcaccgtggacaagagcaggtggcagcaggggaacgtcttctcatgctccgtgatgcatgaggctctgcacaaccactacacgcagaagagcctctccctgtctccgggtaaatctagaactgtggctgcaccatctgtcttcatcttcccgccatctgatgagcagttgaaatctggaactgcctctgttgtgtgcctgctgaattacttctatcccagagaggccaaagtacagtggaaggtggataacgccctccaatcgggtaactcccaggagagtgccacagagcaggacagcaaggacagcacctacagcctcagcagcgagctgacgctgagcaaagcagactacgagaaacacaaagtctacgcctgcgaagtcacccatcagggcctgagctcgcccgtcacaaagagcttcaacaggggagagtga

SEQ ID NO: 809 - DNA, 1608 bp, Artificial Sequence
  Bispecific T-Cell Engaging molecule (BiTE) known as bsc19x3
aagcttgccgccatgggatggagctgtatcatcctcttcttggtagcaacagctacaggtgtccactccgactacaaagatgatgacgataaggatatccagctgacccagtctccagcttctttggctgtgtctctagggcagagggccaccatctcctgcaaggccagccaaagtgttgattatgatggtgatagttatttgaactggtaccaacagattccaggacagccacccaaactcctcatctatgatgcatccaatctagtttctgggatcccacccaggtttagtggcagtgggtctgggacagacttcaccctcaacatccatcctgtggagaaggtggatgctgcaacctatcactgtcagcaaagtactgaggatccgtggacgttcggtggagggaccaagctcgagatcaaaggtggtggtggttctggcggcggcggctccggtggtggtggttctcaggtgcagctgcagcagtctggggctgagctggtgaggcctgggtcctcagtgaagatttcctgcaaggcttctggctatgcattcagtagctactggatgaactgggtgaagcagaggcctggacagggtcttgagtggattggacagatttggcctggagatggtgatactaactacaatggaaagttcaagggtaaagccactctgactgcagacgaatcctccagcacagcctacatgcaactcagcagcctagcatctgaggactctgcggtctatttctgtgcaagacgggagactacgacggtaggccgttattactatgctatggactactggggccaagggaccacggtcaccgtctcctccggaggtggtggatccgatatcaaactgcagcagtcaggggctgaactggcaagacctggggcctcagtgaagatgtcctgcaagacttctggctacacctttactaggtacacgatgcactgggtaaaacagaggcctggacagggtctggaatggattggatacattaatcctagccgtggttatactaattacaatcagaagttcaaggacaaggccacattgactacagacaaatcctccagcacagcctacatgcaactgagcagcctgacatctgaggactctgcagtctattactgtgcaagatattatgatgatcattactgccttgactactggggccaaggcaccactctcacagtctcctcagtcgaaggtggaagtggaggttctggtggaagtggaggttcaggtggagtcgacgacattcagctgacccagtctccagcaatcatgtctgcatctccaggggagaaggtcaccatgacctgcagagccagttcaagtgtaagttacatgaactggtaccagcagaagtcaggcacctcccccaaaagatggatttatgacacatccaaagtggcttctggagtcccttatcgcttcagtggcagtgggtctgggacctcatactctctcacaatcagcagcatggaggctgaagatgctgccacttattactgccaacagtggagtagtaacccgctcacgttcggtgctgggaccaagctggagctgaaacatcatcaccatcatcattag

SEQ ID NO: 810 - protein, 859 aa, Artificial Sequence
  TSC038 comprises: G19-4 (anti-CD3) scFv, human IgG1 SCC-P hinge, human IgG1 CH2, human IgG1 CH3, human Ck(YAE), H75 linker and 3D1 (anti-CD86) scFv
EVQLQQSGPELVKPGASMKISCKASGYSFTGYIVNWLKQSHGKNLEWIGLINPYKGLTTYNQKFKGKATLTVDKSSSTAYMELLSLTSEDSAVYYCARSGYYGDSDWYFDVWGAGTTVTVSSGGGGSGGGGSGGGGSAQDIQMTQTTSSLSASLGDRVTISCRASQDIRNYLNWYQQKPDGTVKLLIYYTSRLHSGVPSRFSGSGSGTDYSLTIANLQPEDIATYFCQQGNTLPWTFGGGTKLVTKRSSEPKSSDKTHTCPPCPSGAPELLGGPSVFLFPPKPKDTLMISRTPEVTCVVVDVSHEDPEVKFNWYVDGVEVHNAKTKPREEQYNSTYRVVSVLTVLHQDWLNGKEYKCKVSNKALPAPIEKTISKAKGQPREPQVYTLPPSRDELTKNQVSLTCLVKGFYPSDIAVEWESNGQPENNYKTTPPVLDSDGSFFLYSKLTVDKSRWQQGNVFSCSVMHEALHNHYTQKSLSLSPGKSRTVAAPSVFIFPPSDEQLKSGTASVVCLLNYFYPREAKVQWKVDNALQSGNSQESATEQDSKDSTYSLSSELTLSKADYEKHKVYACEVTHQGLSSPVTKSFNRGEQRHNNSSLNTGTQMAGHSPNSQVQLQQSGPELVRPGESVKISCKGSGYTFTDYAIQWVKQSHAKSLEWIGVINIYYDNTNYNQKFKGKATMTVDKSSSTAYMELARLTSEDSAIYYCARAAWYMDYWGQGTSVTVSSGGGGSGGGGSGGGGSGGGGSDIVLSQSPSSLAVSAGEKVTMSCKSSQSLLNSRTRENYLAWYQQKPGQSPKLLIYWASTRESGVPDRFTGSGSGTDFTLTISSVQAEDLAVYYCTQSYNLYTFGGGTKLEIK

SEQ ID NO: 811 - protein, 585 aa, Artificial Sequence
  TSC039 comprises from its amino to carboxyl terminus: BMA031 (anti-TCR) scFv, human IgG1 SCC-P hinge, human IgG1 CH2, human IgG1 CH3, and human Ck(YAE)
QVQLVQSGAEVKKPGSSVKVSCKASGYKFTSYVMHWVKQAPGQGLEWIGYINPYNDVTKYNEKFKGKATLTADESTNTAYMELSSLRSEDTAVHYCARGSYYDYDGFVYWGQGTLVTVSSGGGGSGGGGSGGGGSAQDIQMTQSPSTLSASVGDRVTMTCSATSSVSYMHWYQQKPGKAPKRWIYDTSKLASGVPARFIGSGSGTEFTLTISSLQPDDFATYYCQQWSSNPLTFGGGTKVEIKSSSEPKSSDKTHTCPPCPAPELLGGPSVFLFPPKPKDTLMISRTPEVTCVVVDVSHEDPEVKFNWYVDGVEVHNAKTKPREEQYNSTYRVVSVLTVLHQDWLNGKEYKCKVSNKALPAPIEKTISKAKGQPREPQVYTLPPSRDELTKNQVSLTCLVKGFYPSDIAVEWESNGQPENNYKTTPPVLDSDGSFFLYSKLTVDKSRWQQGNVFSCSVMHEALHNHYTQKSLSLSPGKSRTVAAPSVFIFPPSDEQLKSGTASVVCLLNYFYPREAKVQWKVDNALQSGNSQESATEQDSKDSTYSLSSELTLSKADYEKHKVYACEVTHQGLSSPVTKSFNRGE

SEQ ID NO: 812 - protein, 586 aa, Artificial Sequence
  polypeptide TSC041 comprises from its amino to carboxy terminus: CRIS7 (anti-CD3) scFv, human IgG1 SCC-P hinge, human IgG1 CH2, human IgG1 CH3, and human Ck(YAE)
QVQLVQSGGGVVQPGRSLRLSCKASGYTFTRSTMHWVRQAPGKGLEWIGYINPSSAYTNYNQKFKDRFTISADKSKSTAFLQMDSLRPEDTGVYFCARPQVHYDYNGFPYWGQGTPVTVSSGGGGSGGGGSGGGGSAQDIQMTQSPSSLSASVGDRVTMTCSASSSVSYMNWYQQKPGKAPKRWIYDSSKLASGVPARFSGSGSGTDYTLTISSLQPEDFATYYCQQWSRNPPTFGGGTKLQITRSSEPKSSDKTHTCPPCPAPELLGGPSVFLFPPKPKDTLMISRTPEVTCVVVDVSHEDPEVKFNWYVDGVEVHNAKTKPREEQYNSTYRVVSVLTVLHQDWLNGKEYKCKVSNKALPAPIEKTISKAKGQPREPQVYTLPPSRDELTKNQVSLTCLVKGFYPSDIAVEWESNGQPENNYKTTPPVLDSDGSFFLYSKLTVDKSRWQQGNVFSCSVMHEALHNHYTQKSLSLSPGKSRTVAAPSVFIFPPSDEQLKSGTASVVCLLNYFYPREAKVQWKVDNALQSGNSQESATEQDSKDSTYSLSSELTLSKADYEKHKVYACEVTHQGLSSPVTKSFNRGE

SEQ ID NO: 813 - protein, 570 aa, Artificial Sequence
  TSC043 comprises from its amino to carboxy terminus: OKT3-M (Micromet variant anti-CD3, see also US 7,635,472) scFv, human IgG1 SCC-P hinge, human IgG1 CH2, human IgG1 CH3, and human Ck(YAE)
DIKLQQSGAELARPGASVKMSCKTSGYTFTRYTMHWVKQRPGQGLEWIGYINPSRGYTNYNQKFKDKATLTTDKSSSTAYMQLSSLTSEDSAVYYCARYYDDHYCLDYWGQGTTLTVSSVEGGSGGSGGSGGSGGVDDIQLTQSPAIMSASPGEKVTMTCRASSSVSYMNWYQQKSGTSPKRWIYDTSKVASGVPYRFSGSGSGTSYSLTISSMEAEDAATYYCQQWSSSSEPKSSDKTHTCPPCPAPELLGGPSVFLFPPKPKDTLMISRTPEVTCVVVDVSHEDPEVKFNWYVDGVEVHNAKTKPREEQYNSTYRVVSVLTVLHQDWLNGKEYKCKVSNKALPAPIEKTISKAKGQPREPQVYTLPPSRDELTKNQVSLTCLVKGFYPSDIAVEWESNGQPENNYKTTPPVLDSDGSFFLYSKLTVDKSRWQQGNVFSCSVMHEALHNHYTQKSLSLSPGKSRTVAAPSVFIFPPSDEQLKSGTASVVCLLNYFYPREAKVQWKVDNALQSGNSQESATEQDSKDSTYSLSSELTLSKADYEKHKVYACEVTHQGLSSPVTKSFNRGE

SEQ ID NO: 814 - protein, 584 aa, Artificial Sequence
  TSC049 comprises from its amino to carboxy terminus: HD37 (anti-CD19) scFv, human IgG1 SCC-P hinge, human IgG1 CH2(ADCC/CDC null), human IgG1 CH3, and human IgG1 CH1
DIVLTQSPASLAVSLGQRATISCKASQSVDYDGDSYLNWYQQIPGQPPKLLIYDASNLVSGIPPRFSGSGSGTDFTLNIHPVEKVDAATYHCQQSTEDPWTFGGGTKLEIKGGGGSGGGGSGGGGASQVQLQQSGAELVRPGSSVKISCKASGYAFSSYWMNWVKQRPGQGLEWIGQIWPGDGDTNYNGKFKGKATLTADESSSTAYMQLSSLASEDSAVYFCARRETTTVGRYYYAMDYWGQGTSVTVSSSEPKSSDKTHTCPPCPAPEAAGAPSVFLFPPKPKDTLMISRTPEVTCVVVDVSHEDPEVKFNWYVDGVEVHNAKTKPREEQYNSTYRVVSVLTVLHQDWLNGKAYACAVSNKALPAPIEKTISKAKGQPREPQVYTLPPSRDELTKNQVSLTCLVKGFYPSDIAVEWESNGQPENNYKTTPPVLDSDGSFFLYSKLTVDKSRWQQGNVFSCSVMHEALHNHYTQKSLSLSPGKSRASTKGPSVFPLAPSSKSTSGGTAALGCLVKDYFPEPVTVSWNSGALTSGVHTFPAVLQSSGLYSLSSVVTVPSSSLGTQTYICNVNHKPSNTKVDKKV

SEQ ID NO: 815 - protein, 577 aa, Artificial Sequence
  TSC050 comprises from its amino to carboxy terminus: 2H7 (anti-CD20) scFv, human IgG1 SCC-P hinge, human IgG1 CH2(ADCC/CDC null), human IgG1 CH3, and human IgG1 CH1
QIVLSQSPAILSASPGEKVTMTCRASSSVSYMHWYQQKPGSSPKPWIYAPSNLASGVPARFSGSGSGTSYSLTISRVEAEDAATYYCQQWSFNPPTFGAGTKLELKDGGGSGGGGSGGGGASQAYLQQSGAESVRPGASVKMSCKASGYTFTSYNMHWVKQTPRQGLEWIGAIYPGNGDTSYNQKFKGKATLTVDKSSSTAYMQLSSLTSEDSAVYFCARVVYYSNSYWYFDVWGTGTTVTVSSSEPKSSDKTHTCPPCPAPEAAGAPSVFLFPPKPKDTLMISRTPEVTCVVVDVSHEDPEVKFNWYVDGVEVHNAKTKPREEQYNSTYRVVSVLTVLHQDWLNGKAYACAVSNKALPAPIEKTISKAKGQPREPQVYTLPPSRDELTKNQVSLTCLVKGFYPSDIAVEWESNGQPENNYKTTPPVLDSDGSFFLYSKLTVDKSRWQQGNVFSCSVMHEALHNHYTQKSLSLSPGKSRASTKGPSVFPLAPSSKSTSGGTAALGCLVKDYFPEPVTVSWNSGALTSGVHTFPAVLQSSGLYSLSSVVTVPSSSLGTQTYICNVNHKPSNTKVDKKV

SEQ ID NO: 816 - protein, 573 aa, Artificial Sequence
  TSC051 comprises from its amino to carboxy terminus: P2C2 (anti-CD79) scFv, human IgG1 SCC-P hinge, human IgG1 CH2(ADCC/CDC null), human IgG1 CH3, and human IgG1 CH1
DIVMIQDELSNPVSSGESVSISCRSSKSLLDKEGKTYLNWFLQRPGQSPQLLIYLMSMRESGVSDRFSGSGSGTDFTLEISRVKAEDVGVYYCQQLVEYPWTFGGGTKLEIKGGGGSGGGGSGGGGSQIQLVQSGPELKKPGETVKISCKASGYTFTDFSMHWVRQAPGKGLKWMGWINTETGEPTYADDFRGRFAFSLETSASTAYLQINNLKNEDTATYFCTWSAYWGQGTLVTVSASSEPKSSDKTHTCPPCPAPEAAGAPSVFLFPPKPKDTLMISRTPEVTCVVVDVSHEDPEVKFNWYVDGVEVHNAKTKPREEQYNSTYRVVSVLTVLHQDWLNGKAYACAVSNKALPAPIEKTISKAKGQPREPQVYTLPPSRDELTKNQVSLTCLVKGFYPSDIAVEWESNGQPENNYKTTPPVLDSDGSFFLYSKLTVDKSRWQQGNVFSCSVMHEALHNHYTQKSLSLSPGKSRASTKGPSVFPLAPSSKSTSGGTAALGCLVKDYFPEPVTVSWNSGALTSGVHTFPAVLQSSGLYSLSSVVTVPSSSLGTQTYICNVNHKPSNTKVDKKV

SEQ ID NO: 817 - protein, 580 aa, Artificial Sequence
  TSC052 comprises from its amino to carboxy terminus: 5D5 (anti-cMet) scFv, human IgG1 SCC-P hinge, human IgG1 CH2(ADCC/CDC null), human IgG1 CH3, and human IgG1 CH1
DFMMSQSPSSLTVSVGEKVTVSCKSSQSLLYTSSQKNYLAWYQQKPGQSPKLLIYWASTRESGVPDRFTGSGSGTDFTLTITSVKADDLAVYYCQQYYAYPWTFGGGTKLELKGGGGSGGGGSGGGGSQVQLQQSGPELVRPGASVKMSCRASGYTFTSYWLHWVKQRPGQGLEWIGMIDPSNSDTRFNPNFKDKATLNVDRSSNTAYMLLSSLTSADSAVYYCATYGSYVSPLDYWGQGTSVTVSSSEPKSSDKTHTCPPCPAPEAAGAPSVFLFPPKPKDTLMISRTPEVTCVVVDVSHEDPEVKFNWYVDGVEVHNAKTKPREEQYNSTYRVVSVLTVLHQDWLNGKAYACAVSNKALPAPIEKTISKAKGQPREPQVYTLPPSRDELTKNQVSLTCLVKGFYPSDIAVEWESNGQPENNYKTTPPVLDSDGSFFLYSKLTVDKSRWQQGNVFSCSVMHEALHNHYTQKSLSLSPGKSRASTKGPSVFPLAPSSKSTSGGTAALGCLVKDYFPEPVTVSWNSGALTSGVHTFPAVLQSSGLYSLSSVVTVPSSSLGTQTYICNVNHKPSNTKVDKKV

SEQ ID NO: 818 - protein, 588 aa, Artificial Sequence
  TSC053 comprises from its amino to carboxy terminus: G19-4 (anti CD3) scFv, human IgG1 SCC-P hinge, human IgG1 CH2(ADCC/CDC null), human IgG1 CH3, and human Ck(YAE)
EVQLQQSGPELVKPGASMKISCKASGYSFTGYIVNWLKQSHGKNLEWIGLINPYKGLTTYNQKFKGKATLTVDKSSSTAYMELLSLTSEDSAVYYCARSGYYGDSDWYFDVWGAGTTVTVSSGGGGSGGGGSGGGGSAQDIQMTQTTSSLSASLGDRVTISCRASQDIRNYLNWYQQKPDGTVKLLIYYTSRLHSGVPSRFSGSGSGTDYSLTIANLQPEDIATYFCQQGNTLPWTFGGGTKLVTKRSSEPKSSDKTHTCPPCPAPEAAGAPSVFLFPPKPKDTLMISRTPEVTCVVVDVSHEDPEVKFNWYVDGVEVHNAKTKPREEQYNSTYRVVSVLTVLHQDWLNGKAYACAVSNKALPAPIEKTISKAKGQPREPQVYTLPPSRDELTKNQVSLTCLVKGFYPSDIAVEWESNGQPENNYKTTPPVLDSDGSFFLYSKLTVDKSRWQQGNVFSCSVMHEALHNHYTQKSLSLSPGKSRTVAAPSVFIFPPSDEQLKSGTASVVCLLNYFYPREAKVQWKVDNALQSGNSQESATEQDSKDSTYSLSSELTLSKADYEKHKVYACEVTHQGLSSPVTKSFNRGE

SEQ ID NO: 819 - protein, 853 aa, Artificial Sequence [sequence omitted]

SEQ ID NO: 820 - protein, 583 aa, Artificial Sequence
  TSC076 comprises from its amino to carboxy terminus: OKT3 (anti-CD3) scFv, human IgG1 SCC-P hinge, human IgG1 CH2(ADCC/CDC null), human IgG1 CH3, and human Ck(YAE)
QVQLQQSGAELARPGASVKMSCKASGYTFTRYTMHWVKQRPGQGLEWIGYINPSRGYTNYNQKFKDKATLTTDKSSSTAYMQLSSLTSEDSAVYYCARYYDDHYCLDYWGQGTTVTVSSGGGGSGGGGSGGGGSAQQIVLTQSPAIMSASPGEKVTMTCSASSSVSYMNWYQQKSGTSPKRWIYDTSKLASGVPAHFRGSGSGTSYSLTISGMEAEDAATYYCQQWSSNPFTFGSGTKLEINSSEPKSSDKTHTCPPCPAPEAAGAPSVFLFPPKPKDTLMISRTPEVTCVVVDVSHEDPEVKFNWYVDGVEVHNAKTKPREEQYNSTYRVVSVLTVLHQDWLNGKAYACAVSNKALPAPIEKTISKAKGQPREPQVYTLPPSRDELTKNQVSLTCLVKGFYPSDIAVEWESNGQPENNYKTTPPVLDSDGSFFLYSKLTVDKSRWQQGNVFSCSVMHEALHNHYTQKSLSLSPGKSRTVAAPSVFIFPPSDEQLKSGTASVVCLLNYFYPREAKVQWKVDNALQSGNSQESATEQDSKDSTYSLSSELTLSKADYEKHKVYACEVTHQGLSSPVTKSFNRGE

SEQ ID NO: 821 - protein, 586 aa, Artificial Sequence
  TSC077 comprises: HuM291 (anti-CD3) scFv, human IgG1 SCC-P hinge, human IgG1 CH2(ADCC/CDC null), human IgG1 CH3, and human Ck(YAE)
QVQLVQSGAEVKKPGASVKVSCKASGYTFISYTMHWVRQAPGQGLEWMGYINPRSGYTHYNQKLKDKATLTADKSASTAYMELSSLRSEDTAVYYCARSAYYDYDGFAYWGQGTLVTVSSGGGGSGGGGSGGGGSAQDIQMTQSPSSLSASVGDRVTITCSASSSVSYMNWYQQKPGKAPKRLIYDTSKLASGVPSRFSGSGSGTDFTLTISSLQPEDFATYYCQQWSSNPPTFGGGTKVEIKRTSSEPKSSDKTHTCPPCPAPEAAGAPSVFLFPPKPKDTLMISRTPEVTCVVVDVSHEDPEVKFNWYVDGVEVHNAKTKPREEQYNSTYRVVSVLTVLHQDWLNGKAYACAVSNKALPAPIEKTISKAKGQPREPQVYTLPPSRDELTKNQVSLTCLVKGFYPSDIAVEWESNGQPENNYKTTPPVLDSDGSFFLYSKLTVDKSRWQQGNVFSCSVMHEALHNHYTQKSLSLSPGKSRTVAAPSVFIFPPSDEQLKSGTASVVCLLNYFYPREAKVQWKVDNALQSGNSQESATEQDSKDSTYSLSSELTLSKADYEKHKVYACEVTHQGLSSPVTKSFNRGE

SEQ ID NO: 822 - protein, 586 aa, Artificial Sequence
  TSC093 comprises from its amino to carboxy terminus: CRIS7 (anti-CD3) scFv, human IgG1 SCC-P hinge, human IgG1 CH2(ADCC/CDC null), human IgG1 CH3, and human Ck(YAE)
QVQLVQSGGGVVQPGRSLRLSCKASGYTFTRSTMHWVRQAPGKGLEWIGYINPSSAYTNYNQKFKDRFTISADKSKSTAFLQMDSLRPEDTGVYFCARPQVHYDYNGFPYWGQGTPVTVSSGGGGSGGGGSGGGGSAQDIQMTQSPSSLSASVGDRVTMTCSASSSVSYMNWYQQKPGKAPKRWIYDSSKLASGVPARFSGSGSGTDYTLTISSLQPEDFATYYCQQWSRNPPTFGGGTKLQITRSSEPKSSDKTHTCPPCPAPEAAGAPSVFLFPPKPKDTLMISRTPEVTCVVVDVSHEDPEVKFNWYVDGVEVHNAKTKPREEQYNSTYRVVSVLTVLHQDWLNGKAYACAVSNKALPAPIEKTISKAKGQPREPQVYTLPPSRDELTKNQVSLTCLVKGFYPSDIAVEWESNGQPENNYKTTPPVLDSDGSFFLYSKLTVDKSRWQQGNVFSCSVMHEALHNHYTQKSLSLSPGKSRTVAAPSVFIFPPSDEQLKSGTASVVCLLNYFYPREAKVQWKVDNALQSGNSQESATEQDSKDSTYSLSSELTLSKADYEKHKVYACEVTHQGLSSPVTKSFNRGE

SEQ ID NO: 823 - protein, 570 aa, Artificial Sequence
  TSC094 comprises from its amino to carboxy terminus: OKT3-M (Micromet variant anti-CD3) scFv, human IgG1 SCC-P hinge, human IgG1 CH2(ADCC/CDC null), human IgG1 CH3, human Ck(YAE)
DIKLQQSGAELARPGASVKMSCKTSGYTFTRYTMHWVKQRPGQGLEWIGYINPSRGYTNYNQKFKDKATLTTDKSSSTAYMQLSSLTSEDSAVYYCARYYDDHYCLDYWGQGTTLTVSSVEGGSGGSGGSGGSGGVDDIQLTQSPAIMSASPGEKVTMTCRASSSVSYMNWYQQKSGTSPKRWIYDTSKVASGVPYRFSGSGSGTSYSLTISSMEAEDAATYYCQQWSSSSEPKSSDKTHTCPPCPAPEAAGAPSVFLFPPKPKDTLMISRTPEVTCVVVDVSHEDPEVKFNWYVDGVEVHNAKTKPREEQYNSTYRVVSVLTVLHQDWLNGKAYACAVSNKALPAPIEKTISKAKGQPREPQVYTLPPSRDELTKNQVSLTCLVKGFYPSDIAVEWESNGQPENNYKTTPPVLDSDGSFFLYSKLTVDKSRWQQGNVFSCSVMHEALHNHYTQKSLSLSPGKSRTVAAPSVFIFPPSDEQLKSGTASVVCLLNYFYPREAKVQWKVDNALQSGNSQESATEQDSKDSTYSLSSELTLSKADYEKHKVYACEVTHQGLSSPVTKSFNRGE

SEQ ID NO: 824 - protein, 586 aa, Artificial Sequence
  TSC095 comprises from its amino to carboxy terminus: BMA031 (anti-TCR) scFv, human IgG1 SCC-P hinge, human IgG1 CH2(ADCC/CDC null), human IgG1 CH3, human Ck(YAE)
GQVQLVQSGAEVKKPGSSVKVSCKASGYKFTSYVMHWVKQAPGQGLEWIGYINPYNDVTKYNEKFKGKATLTADESTNTAYMELSSLRSEDTAVHYCARGSYYDYDGFVYWGQGTLVTVSSGGGGSGGGGSGGGGSAQDIQMTQSPSTLSASVGDRVTMTCSATSSVSYMHWYQQKPGKAPKRWIYDTSKLASGVPARFIGSGSGTEFTLTISSLQPDDFATYYCQQWSSNPLTFGGGTKVEIKSSSEPKSSDKTHTCPPCPAPEAAGAPSVFLFPPKPKDTLMISRTPEVTCVVVDVSHEDPEVKFNWYVDGVEVHNAKTKPREEQYNSTYRVVSVLTVLHQDWLNGKAYACAVSNKALPAPIEKTISKAKGQPREPQVYTLPPSRDELTKNQVSLTCLVKGFYPSDIAVEWESNGQPENNYKTTPPVLDSDGSFFLYSKLTVDKSRWQQGNVFSCSVMHEALHNHYTQKSLSLSPGKSRTVAAPSVFIFPPSDEQLKSGTASVVCLLNYFYPREAKVQWKVDNALQSGNSQESATEQDSKDSTYSLSSELTLSKADYEKHKVYACEVTHQGLSSPVTKSFNRGE

SEQ ID NO: 825 - protein, 591 aa, Artificial Sequence
  TSC096 comprises: HD37 (anti-CD19) scFv, human IgG1 SCC-P hinge, human IgG1 CH2 (ADCC/CDC null), human IgG1 CH3, human Ck(YAE)
DIVLTQSPASLAVSLGQRATISCKASQSVDYDGDSYLNWYQQIPGQPPKLLIYDASNLVSGIPPRFSGSGSGTDFTLNIHPVEKVDAATYHCQQSTEDPWTFGGGTKLEIKGGGGSGGGGSGGGGASQVQLQQSGAELVRPGSSVKISCKASGYAFSSYWMNWVKQRPGQGLEWIGQIWPGDGDTNYNGKFKGKATLTADESSSTAYMQLSSLASEDSAVYFCARRETTTVGRYYYAMDYWGQGTSVTVSSSEPKSSDKTHTCPPCPAPEAAGAPSVFLFPPKPKDTLMISRTPEVTCVVVDVSHEDPEVKFNWYVDGVEVHNAKTKPREEQYNSTYRVVSVLTVLHQDWLNGKAYACAVSNKALPAPIEKTISKAKGQPREPQVYTLPPSRDELTKNQVSLTCLVKGFYPSDIAVEWESNGQPENNYKTTPPVLDSDGSFFLYSKLTVDKSRWQQGNVFSCSVMHEALHNHYTQKSLSLSPGKSRTVAAPSVFIFPPSDEQLKSGTASVVCLLNYFYPREAKVQWKVDNALQSGNSQESATEQDSKDSTYSLSSELTLSKADYEKHKVYACEVTHQGLSSPVTKSFNRGE

SEQ ID NO: 826 - protein, 583 aa, Artificial Sequence [sequence omitted]

SEQ ID NO: 827 - protein, 512 aa, Artificial Sequence
  Bispecific T-Cell Engaging molecule (BiTE) known as bsc19x3
DYKDDDDKDIQLTQSPASLAVSLGQRATISCKASQSVDYDGDSYLNWYQQIPGQPPKLLIYDASNLVSGIPPRFSGSGSGTDFTLNIHPVEKVDAATYHCQQSTEDPWTFGGGTKLEIKGGGGSGGGGSGGGGSQVQLQQSGAELVRPGSSVKISCKASGYAFSSYWMNWVKQRPGQGLEWIGQIWPGDGDTNYNGKFKGKATLTADESSSTAYMQLSSLASEDSAVYFCARRETTTVGRYYYAMDYWGQGTTVTVSSGGGGSDIKLQQSGAELARPGASVKMSCKTSGYTFTRYTMHWVKQRPGQGLEWIGYINPSRGYTNYNQKFKDKATLTTDKSSSTAYMQLSSLTSEDSAVYYCARYYDDHYCLDYWGQGTTLTVSSVEGGSGGSGGSGGSGGVDDIQLTQSPAIMSASPGEKVTMTCRASSSVSYMNWYQQKSGTSPKRWIYDTSKVASGVPYRFSGSGSGTSYSLTISSMEAEDAATYYCQQWSSNPLTFGAGTKLELKHHHHHH

SEQ ID NO: 828 - protein, 120 aa, Homo sapiens
  VH region of BMA031 (anti-TCR) scFv
QVQLVQSGAEVKKPGSSVKVSCKASGYKFTSYVMHWVKQAPGQGLEWIGYINPYNDVTKYNEKFKGKATLTADESTNTAYMELSSLRSEDTAVHYCARGSYYDYDGFVYWGQGTLVTVSS

SEQ ID NO: 829 - protein, 111 aa, Homo sapiens
  VL region of BMA031 (anti-TCR) scFv
AQDIQMTQSPSTLSASVGDRVTMTCSATSSVSYMHWYQQKPGKAPKRWIYDTSKLASGVPARFIGSGSGTEFTLTISSLQPDDFATYYCQQWSSNPLTFGGGTKVEIKSSS

SEQ ID NO: 830 - protein, 246 aa, Homo sapiens
  BMA031 scFv
QVQLVQSGAEVKKPGSSVKVSCKASGYKFTSYVMHWVKQAPGQGLEWIGYINPYNDVTKYNEKFKGKATLTADESTNTAYMELSSLRSEDTAVHYCARGSYYDYDGFVYWGQGTLVTVSSGGGGSGGGGSGGGGSAQDIQMTQSPSTLSASVGDRVTMTCSATSSVSYMHWYQQKPGKAPKRWIYDTSKLASGVPARFIGSGSGTEFTLTISSLQPDDFATYYCQQWSSNPLTFGGGTKVEIKSSS

SEQ ID NO: 831 - protein, 119 aa, Homo sapiens
  VH region of OKT3-M (anti-CD3) scFv
DIKLQQSGAELARPGASVKMSCKTSGYTFTRYTMHWVKQRPGQGLEWIGYINPSRGYTNYNQKFKDKATLTTDKSSSTAYMQLSSLTSEDSAVYYCARYYDDHYCLDYWGQGTTLTVSS

SEQ ID NO: 832 - protein, 18 aa, Artificial Sequence
  OKT3-M Linker
VEGGSGGSGGSGGSGGVD

SEQ ID NO: 833 - protein, 94 aa, Homo sapiens
  VL region of OKT3-M (anti-CD3) scFv
DIQLTQSPAIMSASPGEKVTMTCRASSSVSYMNWYQQKSGTSPKRWIYDTSKVASGVPYRFSGSGSGTSYSLTISSMEAEDAATYYCQQWSSSS

SEQ ID NO: 834 - protein, 231 aa, Homo sapiens
  OKT3-M scFv
DIKLQQSGAELARPGASVKMSCKTSGYTFTRYTMHWVKQRPGQGLEWIGYINPSRGYTNYNQKFKDKATLTTDKSSSTAYMQLSSLTSEDSAVYYCARYYDDHYCLDYWGQGTTLTVSSVEGGSGGSGGSGGSGGVDDIQLTQSPAIMSASPGEKVTMTCRASSSVSYMNWYQQKSGTSPKRWIYDTSKVASGVPYRFSGSGSGTSYSLTISSMEAEDAATYYCQQWSSSS

SEQ ID NO: 835 - protein, 120 aa, Homo sapiens [sequence omitted]

SEQ ID NO: 836 - protein, 112 aa, Homo sapiens
  VL region of HuM291 (anti-CD3) scFv
AQDIQMTQSPSSLSASVGDRVTITCSASSSVSYMNWYQQKPGKAPKRLIYDTSKLASGVPSRFSGSGSGTDFTLTISSLQPEDFATYYCQQWSSNPPTFGGGTKVEIKRTSS

SEQ ID NO: 837 - protein, 247 aa, Homo sapiens
  HuM291 scFv
QVQLVQSGAEVKKPGASVKVSCKASGYTFISYTMHWVRQAPGQGLEWMGYINPRSGYTHYNQKLKDKATLTADKSASTAYMELSSLRSEDTAVYYCARSAYYDYDGFAYWGQGTLVTVSSGGGGSGGGGSGGGGSAQDIQMTQSPSSLSASVGDRVTITCSASSSVSYMNWYQQKPGKAPKRLIYDTSKLASGVPSRFSGSGSGTDFTLTISSLQPEDFATYYCQQWSSNPPTFGGGTKVEIKRTSS

SEQ ID NO: 838 - protein, 105 aa, Artificial Sequence
  mutated human Ck DAE
TVAAPSVFIFPPSDEQLKSGTASVVCLLNDFYPREAKVQWKVDNALQSGNSQESATEQDSKDSTYSLSSELTLSKADYEKHKVYACEVTHQGLSSPVTKSFNRGE

SEQ ID NO: 839 - protein, 105 aa, Artificial Sequence
  mutated human Ck MAE
TVAAPSVFIFPPSDEQLKSGTASVVCLLNMFYPREAKVQWKVDNALQSGNSQESATEQDSKDSTYSLSSELTLSKADYEKHKVYACEVTHQGLSSPVTKSFNRGE

SEQ ID NO: 840 - protein, 105 aa, Artificial Sequence
  mutated human Ck SAE
TVAAPSVFIFPPSDEQLKSGTASVVCLLNSFYPREAKVQWKVDNALQSGNSQESATEQDSKDSTYSLSSELTLSKADYEKHKVYACEVTHQGLSSPVTKSFNRGE

SEQ ID NO: 841 - protein, 105 aa, Artificial Sequence
  mutated human FAE
TVAAPSVFIFPPSDEQLKSGTASVVCLLNFFYPREAKVQWKVDNALQSGNSQESATEQDSKDSTYSLSSELTLSKADYEKHKVYACEVTHQGLSSPVTKSFNRGE

SEQ ID NO: 842 - protein, 105 aa, Artificial Sequence
  mutated Ck L29E
TVAAPSVFIFPPSDEQLKSGTASVVCELNNFYPREAKVQWKVDNALQSGNSQESVTEQDSKDSTYSLSSTLTLSKADYEKHKVYACEVTHQGLSSPVTKSFNRGE

SEQ ID NO: 843 - protein, 105 aa, Artificial Sequence
  mutated Ck L29K
TVAAPSVFIFPPSDEQLKSGTASVVCKLNNFYPREAKVQWKVDNALQSGNSQESVTEQDSKDSTYSLSSTLTLSKADYEKHKVYACEVTHQGLSSPVTKSFNRGE

SEQ ID NO: 844 - protein, 98 aa, Artificial Sequence
  mutated CH1 V68E
ASTKGPSVFPLAPSSKSTSGGTAALGCLVKDYFPEPVTVSWNSGALTSGVHTFPAVLQSSGLYSLSSEVTVPSSSLGTQTYICNVNHKPSNTKVDKKV

SEQ ID NO: 845 - protein, 98 aa, Artificial Sequence
  mutated CH1 V68K
ASTKGPSVFPLAPSSKSTSGGTAALGCLVKDYFPEPVTVSWNSGALTSGVHTFPAVLQSSGLYSLSSKVTVPSSSLGTQTYICNVNHKPSNTKVDKKV

SEQ ID NO: 846 - protein, 3 aa, Artificial Sequence
  CH3-CH1 linker or CH3-Ck linker
KSR

SEQ ID NO: 847 - protein, 5 aa, Artificial Sequence
  CH3-CH1 linker
GGGSS

SEQ ID NO: 848 - protein, 6 aa, Artificial Sequence
  CH3-CH1 linker
SYSPNS

SEQ ID NO: 849 - protein, 8 aa, Artificial Sequence
  CH3-CH1 linker
SSLNTPNS

SEQ ID NO: 850 - protein, 5 aa, Artificial Sequence
  CH3-Ck linker
GGGSR

SEQ ID NO: 851 - protein, 7 aa, Artificial Sequence
  CH3-Ck linker
SYSPNSR

SEQ ID NO: 852 - protein, 9 aa, Artificial Sequence
  CH3-Ck linker
SSLNTPNSR

SEQ ID NO: 853 - DNA, 1806 bp, Artificial Sequence
  TSC145 (Cris7 scFv-hinge-CH2-CH3-GGGSS linker-CH1)
atggaagcaccagcgcagcttctcttcctcctgctactctggctcccagataccaccggtcaggtccagctggtgcagtctgggggcggagtggtgcagcctgggcggtcactgaggctgtcctgcaaggcttctggctacacctttactagatctacgatgcactgggtaaggcaggcccctggaaagggtctggaatggattggatacattaatcctagcagtgcttatactaattacaatcagaaattcaaggacaggttcacaatcagcgcagacaaatccaagagcacagccttcctgcagatggacagcctgaggcccgaggacaccggcgtctatttctgtgcacggccccaagtccactatgattacaacgggtttccttactggggccaagggactcccgtcactgtctctagcggtggcggagggtctgggggtggcggatccggaggtggtggctctgcacaagacatccagatgacccagtctccaagcagcctgtctgcaagcgtgggggacagggtcaccatgacctgcagtgccagctcaagtgtaagttacatgaactggtaccagcagaagcccggcaaggcccccaaaagatggatttatgactcatccaaactggcttctggagtccctgctcgcttcagtggcagtgggtctgggaccgactataccctcacaatcagcagcctgcagcccgaagatttcgccacttattactgccagcagtggagtcgtaacccacccacgttcggaggggggaccaagctacaaattacacgctcgagtgagcccaaatcttctgacaaaactcacacatgcccaccgtgcccagcacctgaagccgcgggtgcaccgtcagtcttcctcttccccccaaaacccaaggacaccctcatgatctcccggacccctgaggtcacatgcgtggtggtggacgtgagccacgaagaccctgaggtcaagttcaactggtacgtggacggcgtggaggtgcataatgccaagacaaagccgcgggaggagcagtacaacagcacgtaccgtgtggtcagcgtcctcaccgtcctgcaccaggactggctgaatggcaaggcgtacgcgtgcgcggtctccaacaaagccctcccagcccccatcgagaaaaccatctccaaagccaaagggcagccccgagaaccacaggtgtacaccctgcccccatcccgggatgagctgaccaagaaccaggtcagcctgacctgcctggtcaaaggcttctatccaagcgacatcgccgtggagtgggagagcaatgggcagccggagaacaactacaagaccacgcctcccgtgctggactccgacggctccttcttcctctacagcaagctcaccgtggacaagagcaggtggcagcaggggaacgtcttctcatgctccgtgatgcatgaggctctgcacaaccactacacgcagaagagcctctccctgtctccgggtggcggaggctcctcagcctccaccaagggcccatcggtcttccccctggcaccctcctccaagagcacctctgggggcacagcggccctgggctgcctggtcaaggactacttccccgagccggtgacggtgtcgtggaactcaggcgccctgaccagcggcgtgcacaccttcccggctgtcctacagtcctcaggactctactccctcagcagcgtggtgaccgtgccctccagcagcttgggcacccagacctacatctgcaacgtgaatcacaagcccagcaacaccaaggtggacaagaaagtttga

SEQ ID NO: 854 - DNA, 1809 bp, Artificial Sequence
  TSC146 (Cris7 scFv-hinge-CH2-CH3-SYSPNS linker-CH1)
atggaagcaccagcgcagcttctcttcctcctgctactctggctcccagataccaccggtcaggtccagctggtgcagtctgggggcggagtggtgcagcctgggcggtcactgaggctgtcctgcaaggcttctggctacacctttactagatctacgatgcactgggtaaggcaggcccctggaaagggtctggaatggattggatacattaatcctagcagtgcttatactaattacaatcagaaattcaaggacaggttcacaatcagcgcagacaaatccaagagcacagccttcctgcagatggacagcctgaggcccgaggacaccggcgtctatttctgtgcacggccccaagtccactatgattacaacgggtttccttactggggccaagggactcccgtcactgtctctagcggtggcggagggtctgggggtggcggatccggaggtggtggctctgcacaagacatccagatgacccagtctccaagcagcctgtctgcaagcgtgggggacagggtcaccatgacctgcagtgccagctcaagtgtaagttacatgaactggtaccagcagaagcccggcaaggcccccaaaagatggatttatgactcatccaaactggcttctggagtccctgctcgcttcagtggcagtgggtctgggaccgactataccctcacaatcagcagcctgcagcccgaagatttcgccacttattactgccagcagtggagtcgtaacccacccacgttcggaggggggaccaagctacaaattacacgctcgagtgagcccaaatcttctgacaaaactcacacatgcccaccgtgcccagcacctgaagccgcgggtgcaccgtcagtcttcctcttccccccaaaacccaaggacaccctcatgatctcccggacccctgaggtcacatgcgtggtggtggacgtgagccacgaagaccctgaggtcaagttcaactggtacgtggacggcgtggaggtgcataatgccaagacaaagccgcgggaggagcagtacaacagcacgtaccgtgtggtcagcgtcctcaccgtcctgcaccaggactggctgaatggcaaggcgtacgcgtgcgcggtctccaacaaagccctcccagcccccatcgagaaaaccatctccaaagccaaagggcagccccgagaaccacaggtgtacaccctgcccccatcccgggatgagctgaccaagaaccaggtcagcctgacctgcctggtcaaaggcttctatccaagcgacatcgccgtggagtgggagagcaatgggcagccggagaacaactacaagaccacgcctcccgtgctggactccgacggctccttcttcctctacagcaagctcaccgtggacaagagcaggtggcagcaggggaacgtcttctcatgctccgtgatgcatgaggctctgcacaaccactacacgcagaagagcctctccctgtctccgggtagttacagcccgaactctgcctccaccaagggcccatcggtcttccccctggcaccctcctccaagagcacctctgggggcacagcggccctgggctgcctggtcaaggactacttccccgagccggtgacggtgtcgtggaactcaggcgccctgaccagcggcgtgcacaccttcccggctgtcctacagtcctcaggactctactccctcagcagcgtggtgaccgtgccctccagcagcttgggcacccagacctacatctgcaacgtgaatcacaagcccagcaacaccaaggtggacaagaaagtttga

SEQ ID NO: 855 - DNA, 1815 bp, Artificial Sequence
  TSC147 (Cris7 scFv-hinge-CH2-CH3-SSLNTPNS linker-CH1)
atggaagcaccagcgcagcttctcttcctcctgctactctggctcccagataccaccggtcaggtccagctggtgcagtctgggggcggagtggtgcagcctgggcggtcactgaggctgtcctgcaaggcttctggctacacctttactagatctacgatgcactgggtaaggcaggcccctggaaagggtctggaatggattggatacattaatcctagcagtgcttatactaattacaatcagaaattcaaggacaggttcacaatcagcgcagacaaatccaagagcacagccttcctgcagatggacagcctgaggcccgaggacaccggcgtctatttctgtgcacggccccaagtccactatgattacaacgggtttccttactggggccaagggactcccgtcactgtctctagcggtggcggagggtctgggggtggcggatccggaggtggtggctctgcacaagacatccagatgacccagtctccaagcagcctgtctgcaagcgtgggggacagggtcaccatgacctgcagtgccagctcaagtgtaagttacatgaactggtaccagcagaagcccggcaaggcccccaaaagatggatttatgactcatccaaactggcttctggagtccctgctcgcttcagtggcagtgggtctgggaccgactataccctcacaatcagcagcctgcagcccgaagatttcgccacttattactgccagcagtggagtcgtaacccacccacgttcggaggggggaccaagctacaaattacacgctcgagtgagcccaaatcttctgacaaaactcacacatgcccaccgtgcccagcacctgaagccgcgggtgcaccgtcagtcttcctcttccccccaaaacccaaggacaccctcatgatctcccggacccctgaggtcacatgcgtggtggtggacgtgagccacgaagaccctgaggtcaagttcaactggtacgtggacggcgtggaggtgcataatgccaagacaaagccgcgggaggagcagtacaacagcacgtaccgtgtggtcagcgtcctcaccgtcctgcaccaggactggctgaatggcaaggcgtacgcgtgcgcggtctccaacaaagccctcccagcccccatcgagaaaaccatctccaaagccaaagggcagccccgagaaccacaggtgtacaccctgcccccatcccgggatgagctgaccaagaaccaggtcagcctgacctgcctggtcaaaggcttctatccaagcgacatcgccgtggagtgggagagcaatgggcagccggagaacaactacaagaccacgcctcccgtgctggactccgacggctccttcttcctctacagcaagctcaccgtggacaagagcaggtggcagcaggggaacgtcttctcatgctccgtgatgcatgaggctctgcacaaccactacacgcagaagagcctctccctgtctccgggttcttccctgaatacaccgaactctgcctccaccaagggcccatcggtcttccccctggcaccctcctccaagagcacctctgggggcacagcggccctgggctgcctggtcaaggactacttccccgagccggtgacggtgtcgtggaactcaggcgccctgaccagcggcgtgcacaccttcccggctgtcctacagtcctcaggactctactccctcagcagcgtggtgaccgtgccctccagcagcttgggcacccagacctacatctgcaacgtgaatcacaagcccagcaacaccaaggtggacaagaaagtttga

SEQ ID NO: 856 - DNA, 1842 bp, Artificial Sequence
  TSC148 (HD37 scFv-hinge-CH2-CH3-GGGSR linker-Ck)
atggaagcaccagcgcagcttctcttcctcctgctactctggctcccagataccaccggtgacattgtgctgacccaatctccagcttctttggctgtgtctctagggcagagggccaccatctcctgcaaggccagccaaagtgttgattatgatggtgatagttatttgaactggtaccaacagattccaggacagccacccaaactcctcatctatgatgcatccaatctagtttctgggatcccacccaggtttagtggcagtgggtctgggacagacttcaccctcaacatccatcctgtggagaaggtggatgctgcaacctatcactgccagcaaagtactgaggatccgtggacgttcggtggaggcaccaagctggaaatcaaaggtggcggtggttcgggcggtggtgggtcgggtggcggcggagctagccaggttcagctgcagcagtctggggctgagctggtgaggcctgggtcctcagtgaagatttcctgcaaggcttctggctatgcattcagtagctactggatgaactgggtgaagcagaggcctggacagggtcttgagtggattggacagatttggcctggagatggtgatactaactacaatggaaagttcaagggtaaagccactctgactgcagacgaatcctccagcacagcctacatgcaactcagcagcctagcatctgaggactctgcggtctatttctgtgcaagacgggagactacgacggtaggccgttattactatgctatggactactggggtcaaggaacctcagtcaccgtctcctcgagtgagcccaaatcttctgacaaaactcacacatgcccaccgtgcccagcacctgaagccgcgggtgcaccgtcagtcttcctcttccccccaaaacccaaggacaccctcatgatctcccggacccctgaggtcacatgcgtggtggtggacgtgagccacgaagaccctgaggtcaagttcaactggtacgtggacggcgtggaggtgcataatgccaagacaaagccgcgggaggagcagtacaacagcacgtaccgtgtggtcagcgtcctcaccgtcctgcaccaggactggctgaatggcaaggcgtacgcgtgcgcggtctccaacaaagccctcccagcccccatcgagaaaaccatctccaaagccaaagggcagccccgagaaccacaggtgtacaccctgcccccatcccgggatgagctgaccaagaaccaggtcagcctgacctgcctggtcaaaggcttctatccaagcgacatcgccgtggagtgggagagcaatgggcagccggagaacaactacaagaccacgcctcccgtgctggactccgacggctccttcttcctctacagcaagctcaccgtggacaagagcaggtggcagcaggggaacgtcttctcatgctccgtgatgcatgaggctctgcacaaccactacacgcagaagagcctctccctgtctccgggtggcggaggctccaggactgtggctgcaccatctgtcttcatcttcccgccatctgatgagcagttgaaatctggaactgcctctgttgtgtgcctgctgaattacttctatcccagagaggccaaagtacagtggaaggtggataacgccctccaatcgggtaactcccaggagagtgccacagagcaggacagcaaggacagcacctacagcctcagcagcgagctgacgctgagcaaagcagactacgagaaacacaaagtctacgcctgcgaagtcacccatcagggcctgagctcgcccgtcacaaagagcttcaacaggggagagtga

SEQ ID NO: 857 - DNA, 1848 bp, Artificial Sequence
  TSC149 (HD37 scFv-hinge-CH2-CH3-SYSPNSR linker-Ck)
atggaagcaccagcgcagcttctcttcctcctgctactctggctcccagataccaccggtgacattgtgctgacccaatctccagcttctttggctgtgtctctagggcagagggccaccatctcctgcaaggccagccaaagtgttgattatgatggtgatagttatttgaactggtaccaacagattccaggacagccacccaaactcctcatctatgatgcatccaatctagtttctgggatcccacccaggtttagtggcagtgggtctgggacagacttcaccctcaacatccatcctgtggagaaggtggatgctgcaacctatcactgccagcaaagtactgaggatccgtggacgttcggtggaggcaccaagctggaaatcaaaggtggcggtggttcgggcggtggtgggtcgggtggcggcggagctagccaggttcagctgcagcagtctggggctgagctggtgaggcctgggtcctcagtgaagatttcctgcaaggcttctggctatgcattcagtagctactggatgaactgggtgaagcagaggcctggacagggtcttgagtggattggacagatttggcctggagatggtgatactaactacaatggaaagttcaagggtaaagccactctgactgcagacgaatcctccagcacagcctacatgcaactcagcagcctagcatctgaggactctgcggtctatttctgtgcaagacgggagactacgacggtaggccgttattactatgctatggactactggggtcaaggaacctcagtcaccgtctcctcgagtgagcccaaatcttctgacaaaactcacacatgcccaccgtgcccagcacctgaagccgcgggtgcaccgtcagtcttcctcttccccccaaaacccaaggacaccctcatgatctcccggacccctgaggtcacatgcgtggtggtggacgtgagccacgaagaccctgaggtcaagttcaactggtacgtggacggcgtggaggtgcataatgccaagacaaagccgcgggaggagcagtacaacagcacgtaccgtgtggtcagcgtcctcaccgtcctgcaccaggactggctgaatggcaaggcgtacgcgtgcgcggtctccaacaaagccctcccagcccccatcgagaaaaccatctccaaagccaaagggcagccccgagaaccacaggtgtacaccctgcccccatcccgggatgagctgaccaagaaccaggtcagcctgacctgcctggtcaaaggcttctatccaagcgacatcgccgtggagtgggagagcaatgggcagccggagaacaactacaagaccacgcctcccgtgctggactccgacggctccttcttcctctacagcaagctcaccgtggacaagagcaggtggcagcaggggaacgtcttctcatgctccgtgatgcatgaggctctgcacaaccactacacgcagaagagcctctccctgtctccgggtagttacagcccgaactctaggactgtggctgcaccatctgtcttcatcttcccgccatctgatgagcagttgaaatctggaactgcctctgttgtgtgcctgctgaattacttctatcccagagaggccaaagtacagtggaaggtggataacgccctccaatcgggtaactcccaggagagtgccacagagcaggacagcaaggacagcacctacagcctcagcagcgagctgacgctgagcaaagcagactacgagaaacacaaagtctacgcctgcgaagtcacccatcagggcctgagctcgcccgtcacaaagagcttcaacaggggagagtga

SEQ ID NO: 858 - DNA, 1854 bp, Artificial Sequence
  TSC150 (HD37 scFv-hinge-CH2-CH3-SSLNTPNSR linker-Ck)
atggaagcaccagcgcagcttctcttcctcctgctactctggctcccagataccaccggtgacattgtgctgacccaatctccagcttctttggctgtgtctctagggcagagggccaccatctcctgcaaggccagccaaagtgttgattatgatggtgatagttatttgaactggtaccaacagattccaggacagccacccaaactcctcatctatgatgcatccaatctagtttctgggatcccacccaggtttagtggcagtgggtctgggacagacttcaccctcaacatccatcctgtggagaaggtggatgctgcaacctatcactgccagcaaagtactgaggatccgtggacgttcggtggaggcaccaagctggaaatcaaaggtggcggtggttcgggcggtggtgggtcgggtggcggcggagctagccaggttcagctgcagcagtctggggctgagctggtgaggcctgggtcctcagtgaagatttcctgcaaggcttctggctatgcattcagtagctactggatgaactgggtgaagcagaggcctggacagggtcttgagtggattggacagatttggcctggagatggtgatactaactacaatggaaagttcaagggtaaagccactctgactgcagacgaatcctccagcacagcctacatgcaactcagcagcctagcatctgaggactctgcggtctatttctgtgcaagacgggagactacgacggtaggccgttattactatgctatggactactggggtcaaggaacctcagtcaccgtctcctcgagtgagcccaaatcttctgacaaaactcacacatgcccaccgtgcccagcacctgaagccgcgggtgcaccgtcagtcttcctcttccccccaaaacccaaggacaccctcatgatctcccggacccctgaggtcacatgcgtggtggtggacgtgagccacgaagaccctgaggtcaagttcaactggtacgtggacggcgtggaggtgcataatgccaagacaaagccgcgggaggagcagtacaacagcacgtaccgtgtggtcagcgtcctcaccgtcctgcaccaggactggctgaatggcaaggcgtacgcgtgcgcggtctccaacaaagccctcccagcccccatcgagaaaaccatctccaaagccaaagggcagccccgagaaccacaggtgtacaccctgcccccatcccgggatgagctgaccaagaaccaggtcagcctgacctgcctggtcaaaggcttctatccaagcgacatcgccgtggagtgggagagcaatgggcagccggagaacaactacaagaccacgcctcccgtgctggactccgacggctccttcttcctctacagcaagctcaccgtggacaagagcaggtggcagcaggggaacgtcttctcatgctccgtgatgcatgaggctctgcacaaccactacacgcagaagagcctctccctgtctccgggttcttccctgaatacaccgaactctaggactgtggctgcaccatctgtcttcatcttcccgccatctgatgagcagttgaaatctggaactgcctctgttgtgtgcctgctgaattacttctatcccagagaggccaaagtacagtggaaggtggataacgccctccaatcgggtaactcccaggagagtgccacagagcaggacagcaaggacagcacctacagcctcagcagcgagctgacgctgagcaaagcagactacgagaaacacaaagtctacgcctgcgaagtcacccatcagggcctgagctcgcccgtcacaaagagcttcaacaggggagagtga

SEQ ID NO: 859 - protein, 581 aa, Artificial Sequence
  TSC145 (Cris7 scFv-hinge-CH2-CH3-GGGSS linker-CH1)
QVQLVQSGGGVVQPGRSLRLSCKASGYTFTRSTMHWVRQAPGKGLEWIGYINPSSAYTNYNQKFKDRFTISADKSKSTAFLQMDSLRPEDTGVYFCARPQVHYDYNGFPYWGQGTPVTVSSGGGGSGGGGSGGGGSAQDIQMTQSPSSLSASVGDRVTMTCSASSSVSYMNWYQQKPGKAPKRWIYDSSKLASGVPARFSGSGSGTDYTLTISSLQPEDFATYYCQQWSRNPPTFGGGTKLQITRSSEPKSSDKTHTCPPCPAPEAAGAPSVFLFPPKPKDTLMISRTPEVTCVVVDVSHEDPEVKFNWYVDGVEVHNAKTKPREEQYNSTYRVVSVLTVLHQDWLNGKAYACAVSNKALPAPIEKTISKAKGQPREPQVYTLPPSRDELTKNQVSLTCLVKGFYPSDIAVEWESNGQPENNYKTTPPVLDSDGSFFLYSKLTVDKSRWQQGNVFSCSVMHEALHNHYTQKSLSLSPGGGGSSASTKGPSVFPLAPSSKSTSGGTAALGCLVKDYFPEPVTVSWNSGALTSGVHTFPAVLQSSGLYSLSSVVTVPSSSLGTQTYICNVNHKPSNTKVDKKV

SEQ ID NO: 860 - protein, 582 aa, Artificial Sequence
  TSC146 (Cris7 scFv-hinge-CH2-CH3-SYSPNS linker-CH1)
QVQLVQSGGGVVQPGRSLRLSCKASGYTFTRSTMHWVRQAPGKGLEWIGYINPSSAYTNYNQKFKDRFTISADKSKSTAFLQMDSLRPEDTGVYFCARPQVHYDYNGFPYWGQGTPVTVSSGGGGSGGGGSGGGGSAQDIQMTQSPSSLSASVGDRVTMTCSASSSVSYMNWYQQKPGKAPKRWIYDSSKLASGVPARFSGSGSGTDYTLTISSLQPEDFATYYCQQWSRNPPTFGGGTKLQITRSSEPKSSDKTHTCPPCPAPEAAGAPSVFLFPPKPKDTLMISRTPEVTCVVVDVSHEDPEVKFNWYVDGVEVHNAKTKPREEQYNSTYRVVSVLTVLHQDWLNGKAYACAVSNKALPAPIEKTISKAKGQPREPQVYTLPPSRDELTKNQVSLTCLVKGFYPSDIAVEWESNGQPENNYKTTPPVLDSDGSFFLYSKLTVDKSRWQQGNVFSCSVMHEALHNHYTQKSLSLSPGSYSPNSASTKGPSVFPLAPSSKSTSGGTAALGCLVKDYFPEPVTVSWNSGALTSGVHTFPAVLQSSGLYSLSSVVTVPSSSLGTQTYICNVNHKPSNTKVDKKV

SEQ ID NO: 861 - protein, 584 aa, Artificial Sequence
  TSC147 (Cris7 scFv-hinge-CH2-CH3-SSLNTPNS linker-CH1)
QVQLVQSGGGVVQPGRSLRLSCKASGYTFTRSTMHWVRQAPGKGLEWIGYINPSSAYTNYNQKFKDRFTISADKSKSTAFLQMDSLRPEDTGVYFCARPQVHYDYNGFPYWGQGTPVTVSSGGGGSGGGGSGGGGSAQDIQMTQSPSSLSASVGDRVTMTCSASSSVSYMNWYQQKPGKAPKRWIYDSSKLASGVPARFSGSGSGTDYTLTISSLQPEDFATYYCQQWSRNPPTFGGGTKLQITRSSEPKSSDKTHTCPPCPAPEAAGAPSVFLFPPKPKDTLMISRTPEVTCVVVDVSHEDPEVKFNWYVDGVEVHNAKTKPREEQYNSTYRVVSVLTVLHQDWLNGKAYACAVSNKALPAPIEKTISKAKGQPREPQVYTLPPSRDELTKNQVSLTCLVKGFYPSDIAVEWESNGQPENNYKTTPPVLDSDGSFFLYSKLTVDKSRWQQGNVFSCSVMHEALHNHYTQKSLSLSPGSSLNTPNSASTKGPSVFPLAPSSKSTSGGTAALGCLVKDYFPEPVTVSWNSGALTSGVHTFPAVLQSSGLYSLSSVVTVPSSSLGTQTYICNVNHKPSNTKVDKKV

SEQ ID NO: 862 - protein, 593 aa, Artificial Sequence
  TSC148 (HD37 scFv-hinge-CH2-CH3-GGGSR linker-Ck)
DIVLTQSPASLAVSLGQRATISCKASQSVDYDGDSYLNWYQQIPGQPPKLLIYDASNLVSGIPPRFSGSGSGTDFTLNIHPVEKVDAATYHCQQSTEDPWTFGGGTKLEIKGGGGSGGGGSGGGGASQVQLQQSGAELVRPGSSVKISCKASGYAFSSYWMNWVKQRPGQGLEWIGQIWPGDGDTNYNGKFKGKATLTADESSSTAYMQLSSLASEDSAVYFCARRETTTVGRYYYAMDYWGQGTSVTVSSSEPKSSDKTHTCPPCPAPEAAGAPSVFLFPPKPKDTLMISRTPEVTCVVVDVSHEDPEVKFNWYVDGVEVHNAKTKPREEQYNSTYRVVSVLTVLHQDWLNGKAYACAVSNKALPAPIEKTISKAKGQPREPQVYTLPPSRDELTKNQVSLTCLVKGFYPSDIAVEWESNGQPENNYKTTPPVLDSDGSFFLYSKLTVDKSRWQQGNVFSCSVMHEALHNHYTQKSLSLSPGGGGSRTVAAPSVFIFPPSDEQLKSGTASVVCLLNYFYPREAKVQWKVDNALQSGNSQESATEQDSKDSTYSLSSELTLSKADYEKHKVYACEVTHQGLSSPVTKSFNRGE

SEQ ID NO: 863 - protein, 595 aa, Artificial Sequence
  TSC149 (HD37 scFv-hinge-CH2-CH3-SYSPNSR linker-Ck)
DIVLTQSPASLAVSLGQRATISCKASQSVDYDGDSYLNWYQQIPGQPPKLLIYDASNLVSGIPPRFSGSGSGTDFTLNIHPVEKVDAATYHCQQSTEDPWTFGGGTKLEIKGGGGSGGGGSGGGGASQVQLQQSGAELVRPGSSVKISCKASGYAFSSYWMNWVKQRPGQGLEWIGQIWPGDGDTNYNGKFKGKATLTADESSSTAYMQLSSLASEDSAVYFCARRETTTVGRYYYAMDYWGQGTSVTVSSSEPKSSDKTHTCPPCPAPEAAGAPSVFLFPPKPKDTLMISRTPEVTCVVVDVSHEDPEVKFNWYVDGVEVHNAKTKPREEQYNSTYRVVSVLTVLHQDWLNGKAYACAVSNKALPAPIEKTISKAKGQPREPQVYTLPPSRDELTKNQVSLTCLVKGFYPSDIAVEWESNGQPENNYKTTPPVLDSDGSFFLYSKLTVDKSRWQQGNVFSCSVMHEALHNHYTQKSLSLSPGSYSPNSRTVAAPSVFIFPPSDEQLKSGTASVVCLLNYFYPREAKVQWKVDNALQSGNSQESATEQDSKDSTYSLSSELTLSKADYEKHKVYACEVTHQGLSSPVTKSFNRGE

SEQ ID NO: 864 - protein, 597 aa, Artificial Sequence
  TSC150 (HD37 scFv-hinge-CH2-CH3-SSLNTPNSR linker-Ck)
DIVLTQSPASLAVSLGQRATISCKASQSVDYDGDSYLNWYQQIPGQPPKLLIYDASNLVSGIPPRFSGSGSGTDFTLNIHPVEKVDAATYHCQQSTEDPWTFGGGTKLEIKGGGGSGGGGSGGGGASQVQLQQSGAELVRPGSSVKISCKASGYAFSSYWMNWVKQRPGQGLEWIGQIWPGDGDTNYNGKFKGKATLTADESSSTAYMQLSSLASEDSAVYFCARRETTTVGRYYYAMDYWGQGTSVTVSSSEPKSSDKTHTCPPCPAPEAAGAPSVFLFPPKPKDTLMISRTPEVTCVVVDVSHEDPEVKFNWYVDGVEVHNAKTKPREEQYNSTYRVVSVLTVLHQDWLNGKAYACAVSNKALPAPIEKTISKAKGQPREPQVYTLPPSRDELTKNQVSLTCLVKGFYPSDIAVEWESNGQPENNYKTTPPVLDSDGSFFLYSKLTVDKSRWQQGNVFSCSVMHEALHNHYTQKSLSLSPGSSLNTPNSRTVAAPSVFIFPPSDEQLKSGTASVVCLLNYFYPREAKVQWKVDNALQSGNSQESATEQDSKDSTYSLSSELTLSKADYEKHKVYACEVTHQGLSSPVTKSFNRGE

SEQ ID NO: 865 - DNA, 1800 bp, Artificial Sequence
  TSC125 (Cris7 scFv-CH2-CH3-CH1)
atggaagcaccagcgcagcttctcttcctcctgctactctggctcccagataccaccggtcaggtccagctggtgcagtctgggggcggagtggtgcagcctgggcggtcactgaggctgtcctgcaaggcttctggctacacctttactagatctacgatgcactgggtaaggcaggcccctggaaagggtctggaatggattggatacattaatcctagcagtgcttatactaattacaatcagaaattcaaggacaggttcacaatcagcgcagacaaatccaagagcacagccttcctgcagatggacagcctgaggcccgaggacaccggcgtctatttctgtgcacggccccaagtccactatgattacaacgggtttccttactggggccaagggactcccgtcactgtctctagcggtggcggagggtctgggggtggcggatccggaggtggtggctctgcacaagacatccagatgacccagtctccaagcagcctgtctgcaagcgtgggggacagggtcaccatgacctgcagtgccagctcaagtgtaagttacatgaactggtaccagcagaagcccggcaaggcccccaaaagatggatttatgactcatccaaactggcttctggagtccctgctcgcttcagtggcagtgggtctgggaccgactataccctcacaatcagcagcctgcagcccgaagatttcgccacttattactgccagcagtggagtcgtaacccacccacgttcggaggggggaccaagctacaaattacacgctcgagtgagcccaaatcttctgacaaaactcacacatgcccaccgtgcccagcacctgaagccgcgggtgcaccgtcagtcttcctcttccccccaaaacccaaggacaccctcatgatctcccggacccctgaggtcacatgcgtggtggtggacgtgagccacgaagaccctgaggtcaagttcaactggtacgtggacggcgtggaggtgcataatgccaagacaaagccgcgggaggagcagtacaacagcacgtaccgtgtggtcagcgtcctcaccgtcctgcaccaggactggctgaatggcaaggcgtacgcgtgcgcggtctccaacaaagccctcccagcccccatcgagaaaaccatctccaaagccaaagggcagccccgagaaccacaggtgtacaccctgcccccatcccgggatgagctgaccaagaaccaggtcagcctgacctgcctggtcaaaggcttctatccaagcgacatcgccgtggagtgggagagcaatgggcagccggagaacaactacaagaccacgcctcccgtgctggactccgacggctccttcttcctctacagcaagctcaccgtggacaagagcaggtggcagcaggggaacgtcttctcatgctccgtgatgcatgaggctctgcacaaccactacacgcagaagagcctctccctgtctccgggtaaatctagagcctccaccaagggcccatcggtcttccccctggcaccctcctccaagagcacctctgggggcacagcggccctgggctgcctggtcaaggactacttccccgagccggtgacggtgtcgtggaactcaggcgccctgaccagcggcgtgcacaccttcccggctgtcctacagtcctcaggactctactccctcagcagcgtggtgaccgtgccctccagcagcttgggcacccagacctacatctgcaacgtgaatcacaagcccagcaacaccaaggtggacaagaaagtttga

SEQ ID NO: 866 - DNA, 1785 bp, Artificial Sequence
  TSC157 (Cris7 scFv-IgA2UH-CH2-CH3-CH1)
atggaagcaccagcgcagcttctcttcctcctgctactctggctcccagataccaccggtcaggtccagctggtgcagtctgggggcggagtggtgcagcctgggcggtcactgaggctgtcctgcaaggcttctggctacacctttactagatctacgatgcactgggtaaggcaggcccctggaaagggtctggaatggattggatacattaatcctagcagtgcttatactaattacaatcagaaattcaaggacaggttcacaatcagcgcagacaaatccaagagcacagccttcctgcagatggacagcctgaggcccgaggacaccggcgtctatttctgtgcacggccccaagtccactatgattacaacgggtttccttactggggccaagggactcccgtcactgtctctagcggtggcggagggtctgggggtggcggatccggaggtggtggctctgcacaagacatccagatgacccagtctccaagcagcctgtctgcaagcgtgggggacagggtcaccatgacctgcagtgccagctcaagtgtaagttacatgaactggtaccagcagaagcccggcaaggcccccaaaagatggatttatgactcatccaaactggcttctggagtccctgctcgcttcagtggcagtgggtctgggaccgactataccctcacaatcagcagcctgcagcccgaagatttcgccacttattactgccagcagtggagtcgtaacccacccacgttcggaggggggaccaagctacaaattacacgctcgagccccccacctcccccatgcccaccgtgcccagcacctgaagccgcgggtgcaccgtcagtcttcctcttccccccaaaacccaaggacaccctcatgatctcccggacccctgaggtcacatgcgtggtggtggacgtgagccacgaagaccctgaggtcaagttcaactggtacgtggacggcgtggaggtgcataatgccaagacaaagccgcgggaggagcagtacaacagcacgtaccgtgtggtcagcgtcctcaccgtcctgcaccaggactggctgaatggcaaggcgtacgcgtgcgcggtctccaacaaagccctcccagcccccatcgagaaaaccatctccaaagccaaagggcagccccgagaaccacaggtgtacaccctgcccccatcccgggatgagctgaccaagaaccaggtcagcctgacctgcctggtcaaaggcttctatccaagcgacatcgccgtggagtgggagagcaatgggcagccggagaacaactacaagaccacgcctcccgtgctggactccgacggctccttcttcctctacagcaagctcaccgtggacaagagcaggtggcagcaggggaacgtcttctcatgctccgtgatgcatgaggctctgcacaaccactacacgcagaagagcctctccctgtctccgggtaaatctagagcctccaccaagggcccatcggtcttccccctggcaccctcctccaagagcacctctgggggcacagcggccctgggctgcctggtcaaggactacttccccgagccggtgacggtgtcgtggaactcaggcgccctgaccagcggcgtgcacaccttcccggctgtcctacagtcctcaggactctactccctcagcagcgtggtgaccgtgccctccagcagcttgggcacccagacctacatctgcaacgtgaatcacaagcccagcaacaccaaggtggacaagaaagtttga

SEQ ID NO: 867 - DNA, 1815 bp, Artificial Sequence
  TSC158 (Cris7 scFv-IgG1miniUH-CH2-CH3-CH1)
atggaagcaccagcgcagcttctcttcctcctgctactctggctcccagataccaccggtcaggtccagctggtgcagtctgggggcggagtggtgcagcctgggcggtcactgaggctgtcctgcaaggcttctggctacacctttactagatctacgatgcactgggtaaggcaggcccctggaaagggtctggaatggattggatacattaatcctagcagtgcttatactaattacaatcagaaattcaaggacaggttcacaatcagcgcagacaaatccaagagcacagccttcctgcagatggacagcctgaggcccgaggacaccggcgtctatttctgtgcacggccccaagtccactatgattacaacgggtttccttactggggccaagggactcccgtcactgtctctagcggtggcggagggtctgggggtggcggatccggaggtggtggctctgcacaagacatccagatgacccagtctccaagcagcctgtctgcaagcgtgggggacagggtcaccatgacctgcagtgccagctcaagtgtaagttacatgaactggtaccagcagaagcccggcaaggcccccaaaagatggatttatgactcatccaaactggcttctggagtccctgctcgcttcagtggcagtgggtctgggaccgactataccctcacaatcagcagcctgcagcccgaagatttcgccacttattactgccagcagtggagtcgtaacccacccacgttcggaggggggaccaagctacaaattacacgctcgagcgagcccaaatcttctgacaaaactcacacaagcccaccgagcccatgcccaccgtgcccagcacctgaagccgcgggtgcaccgtcagtcttcctcttccccccaaaacccaaggacaccctcatgatctcccggacccctgaggtcacatgcgtggtggtggacgtgagccacgaagaccctgaggtcaagttcaactggtacgtggacggcgtggaggtgcataatgccaagacaaagccgcgggaggagcagtacaacagcacgtaccgtgtggtcagcgtcctcaccgtcctgcaccaggactggctgaatggcaaggcgtacgcgtgcgcggtctccaacaaagccctcccagcccccatcgagaaaaccatctccaaagccaaagggcagccccgagaaccacaggtgtacaccctgcccccatcccgggatgagctgaccaagaaccaggtcagcctgacctgcctggtcaaaggcttctatccaagcgacatcgccgtggagtgggagagcaatgggcagccggagaacaactacaagaccacgcctcccgtgctggactccgacggctccttcttcctctacagcaagctcaccgtggacaagagcaggtggcagcaggggaacgtcttctcatgctccgtgatgcatgaggctctgcacaaccactacacgcagaagagcctctccctgtctccgggtaaatctagagcctccaccaagggcccatcggtcttccccctggcaccctcctccaagagcacctctgggggcacagcggccctgggctgcctggtcaaggactacttccccgagccggtgacggtgtcgtggaactcaggcgccctgaccagcggcgtgcacaccttcccggctgtcctacagtcctcaggactctactccctcagcagcgtggtgaccgtgccctccagcagcttgggcacccagacctacatctgcaacgtgaatcacaagcccagcaacaccaaggtggacaagaaagtttga

SEQ ID NO: 868 - DNA, 1815 bp, Artificial Sequence
  TSC159 (Cris7 scFv-IgG3UH-CH2-CH3-CH1)
atggaagcaccagcgcagcttctcttcctcctgctactctggctcccagataccaccggtcaggtccagctggtgcagtctgggggcggagtggtgcagcctgggcggtcactgaggctgtcctgcaaggcttctggctacacctttactagatctacgatgcactgggtaaggcaggcccctggaaagggtctggaatggattggatacattaatcctagcagtgcttatactaattacaatcagaaattcaaggacaggttcacaatcagcgcagacaaatccaagagcacagccttcctgcagatggacagcctgaggcccgaggacaccggcgtctatttctgtgcacggccccaagtccactatgattacaacgggtttccttactggggccaagggactcccgtcactgtctctagcggtggcggagggtctgggggtggcggatccggaggtggtggctctgcacaagacatccagatgacccagtctccaagcagcctgtctgcaagcgtgggggacagggtcaccatgacctgcagtgccagctcaagtgtaagttacatgaactggtaccagcagaagcccggcaaggcccccaaaagatggatttatgactcatccaaactggcttctggagtccctgctcgcttcagtggcagtgggtctgggaccgactataccctcacaatcagcagcctgcagcccgaagatttcgccacttattactgccagcagtggagtcgtaacccacccacgttcggaggggggaccaagctacaaattacacgctcgagcgagcccaaatctagcgacacacctcccccaagcccacggtccccatgcccaccgtgcccagcacctgaagccgcgggtgcaccgtcagtcttcctcttccccccaaaacccaaggacaccctcatgatctcccggacccctgaggtcacatgcgtggtggtggacgtgagccacgaagaccctgaggtcaagttcaactggtacgtggacggcgtggaggtgcataatgccaagacaaagccgcgggaggagcagtacaacagcacgtaccgtgtggtcagcgtcctcaccgtcctgcaccaggactggctgaatggcaaggcgtacgcgtgcgcggtctccaacaaagccctcccagcccccatcgagaaaaccatctccaaagccaaagggcagccccgagaaccacaggtgtacaccctgcccccatcccgggatgagctgaccaagaaccaggtcagcctgacctgcctggtcaaaggcttctatccaagcgacatcgccgtggagtgggagagcaatgggcagccggagaacaactacaagaccacgcctcccgtgctggactccgacggctccttcttcctctacagcaagctcaccgtggacaagagcaggtggcagcaggggaacgtcttctcatgctccgtgatgcatgaggctctgcacaaccactacacgcagaagagcctctccctgtctccgggtaaatctagagcctccaccaagggcccatcggtcttccccctggcaccctcctccaagagcacctctgggggcacagcggccctgggctgcctggtcaaggactacttccccgagccggtgacggtgtcgtggaactcaggcgccctgaccagcggcgtgcacaccttcccggctgtcctacagtcctcaggactctactccctcagcagcgtggtgaccgtgccctccagcagcttgggcacccagacctacatctgcaacgtgaatcacaagcccagcaacaccaaggtggacaagaaagtttga

SEQ ID NO: 869 - DNA, 2103 bp, Artificial Sequence
  TSC160 (Cris7 scFv-IgMCH2UH-CH2-CH3-CH1)
atggaagcaccagcgcagcttctcttcctcctgctactctggctcccagataccaccggtcaggtccagctggtgcagtctgggggcggagtggtgcagcctgggcggtcactgaggctgtcctgcaaggcttctggctacacctttactagatctacgatgcactgggtaaggcaggcccctggaaagggtctggaatggattggatacattaatcctagcagtgcttatactaattacaatcagaaattcaaggacaggttcacaatcagcgcagacaaatccaagagcacagccttcctgcagatggacagcctgaggcccgaggacaccggcgtctatttctgtgcacggccccaagtccactatgattacaacgggtttccttactggggccaagggactcccgtcactgtctctagcggtggcggagggtctgggggtggcggatccggaggtggtggctctgcacaagacatccagatgacccagtctccaagcagcctgtctgcaagcgtgggggacagggtcaccatgacctgcagtgccagctcaagtgtaagttacatgaactggtaccagcagaagcccggcaaggcccccaaaagatggatttatgactcatccaaactggcttctggagtccctgctcgcttcagtggcagtgggtctgggaccgactataccctcacaatcagcagcctgcagcccgaagatttcgccacttattactgccagcagtggagtcgtaacccacccacgttcggaggggggaccaagctacaaattacacgctcgagcattgccgagctgcctcccaaagtgagcgtcttcgtcccaccccgcgacggcttcttcggcaacccccgcaagtccaagctcatctgccaggccacgggtttcagtccccggcagattcaggtgtcctggctgcgcgaggggaagcaggtggggtctggcgtcaccacggaccaggtgcaggctgaggccaaagagtctgggcccacgacctacaaggtgaccagcacactgaccatcaaagagagcgactggctcagccagagcatgttcacctgccgcgtggatcacaggggcctgaccttccagcagaatgcgtcctccatgagtgtcccctgcccaccgtgcccagcacctgaagccgcgggtgcaccgtcagtcttcctcttccccccaaaacccaaggacaccctcatgatctcccggacccctgaggtcacatgcgtggtggtggacgtgagccacgaagaccctgaggtcaagttcaactggtacgtggacggcgtggaggtgcataatgccaagacaaagccgcgggaggagcagtacaacagcacgtaccgtgtggtcagcgtcctcaccgtcctgcaccaggactggctgaatggcaaggcgtacgcgtgcgcggtctccaacaaagccctcccagcccccatcgagaaaaccatctccaaagccaaagggcagccccgagaaccacaggtgtacaccctgcccccatcccgggatgagctgaccaagaaccaggtcagcctgacctgcctggtcaaaggcttctatccaagcgacatcgccgtggagtgggagagcaatgggcagccggagaacaactacaagaccacgcctcccgtgctggactccgacggctccttcttcctctacagcaagctcaccgtggacaagagcaggtggcagcaggggaacgtcttctcatgctccgtgatgcatgaggctctgcacaaccactacacgcagaagagcctctccctgtctccgggtaaatctagagcctccaccaagggcccatcggtcttccccctggcaccctcctccaagagcacctctgggggcacagcggccctgggctgcctggtcaaggactacttccccgagccggtgacggtgtcgtggaactcaggcgccctgaccagcggcgtgcacaccttcccggctgtcctacagtcctcaggactctactccctcagcagcgtggtgaccgtgccctccagcagcttgggcacccagacctacatctgcaacgtgaatcacaagcccagcaacaccaaggtggacaagaaagtttga

SEQ ID NO: 870 - DNA, 1821 bp, Artificial Sequence
  TSC161 (HD37 scFv-IgA2UH-CH2-CH3-Ck)
atggaagcaccagcgcagcttctcttcctcctgctactctggctcccagataccaccggtgacattgtgctgacccaatctccagcttctttggctgtgtctctagggcagagggccaccatctcctgcaaggccagccaaagtgttgattatgatggtgatagttatttgaactggtaccaacagattccaggacagccacccaaactcctcatctatgatgcatccaatctagtttctgggatcccacccaggtttagtggcagtgggtctgggacagacttcaccctcaacatccatcctgtggagaaggtggatgctgcaacctatcactgccagcaaagtactgaggatccgtggacgttcggtggaggcaccaagctggaaatcaaaggtggcggtggttcgggcggtggtgggtcgggtggcggcggagctagccaggttcagctgcagcagtctggggctgagctggtgaggcctgggtcctcagtgaagatttcctgcaaggcttctggctatgcattcagtagctactggatgaactgggtgaagcagaggcctggacagggtcttgagtggattggacagatttggcctggagatggtgatactaactacaatggaaagttcaagggtaaagccactctgactgcagacgaatcctccagcacagcctacatgcaactcagcagcctagcatctgaggactctgcggtctatttctgtgcaagacgggagactacgacggtaggccgttattactatgctatggactactggggtcaaggaacctcagtcaccgtctcctcgagccccccacctcccccatgcccaccgtgcccagcacctgaagccgcgggtgcaccgtcagtcttcctcttccccccaaaacccaaggacaccctcatgatctcccggacccctgaggtcacatgcgtggtggtggacgtgagccacgaagaccctgaggtcaagttcaactggtacgtggacggcgtggaggtgcataatgccaagacaaagccgcgggaggagcagtacaacagcacgtaccgtgtggtcagcgtcctcaccgtcctgcaccaggactggctgaatggcaaggcgtacgcgtgcgcggtctccaacaaagccctcccagcccccatcgagaaaaccatctccaaagccaaagggcagccccgagaaccacaggtgtacaccctgcccccatcccgggatgagctgaccaagaaccaggtcagcctgacctgcctggtcaaaggcttctatccaagcgacatcgccgtggagtgggagagcaatgggcagccggagaacaactacaagaccacgcctcccgtgctggactccgacggctccttcttcctctacagcaagctcaccgtggacaagagcaggtggcagcaggggaacgtcttctcatgctccgtgatgcatgaggctctgcacaaccactacacgcagaagagcctctccctgtctccgggtaaatctagaactgtggctgcaccatctgtcttcatcttcccgccatctgatgagcagttgaaatctggaactgcctctgttgtgtgcctgctgaattacttctatcccagagaggccaaagtacagtggaaggtggataacgccctccaatcgggtaactcccaggagagtgccacagagcaggacagcaaggacagcacctacagcctcagcagcgagctgacgctgagcaaagcagactacgagaaacacaaagtctacgcctgcgaagtcacccatcagggcctgagctcgcccgtcacaaagagcttcaacaggggagagtga

SEQ ID NO: 871 - DNA, 1851 bp, Artificial Sequence
  TSC162 (HD37 scFv-IgG1miniUH-CH2-CH3-Ck)
atggaagcaccagcgcagcttctcttcctcctgctactctggctcccagataccaccggtgacattgtgctgacccaatctccagcttctttggctgtgtctctagggcagagggccaccatctcctgcaaggccagccaaagtgttgattatgatggtgatagttatttgaactggtaccaacagattccaggacagccacccaaactcctcatctatgatgcatccaatctagtttctgggatcccacccaggtttagtggcagtgggtctgggacagacttcaccctcaacatccatcctgtggagaaggtggatgctgcaacctatcactgccagcaaagtactgaggatccgtggacgttcggtggaggcaccaagctggaaatcaaaggtggcggtggttcgggcggtggtgggtcgggtggcggcggagctagccaggttcagctgcagcagtctggggctgagctggtgaggcctgggtcctcagtgaagatttcctgcaaggcttctggctatgcattcagtagctactggatgaactgggtgaagcagaggcctggacagggtcttgagtggattggacagatttggcctggagatggtgatactaactacaatggaaagttcaagggtaaagccactctgactgcagacgaatcctccagcacagcctacatgcaactcagcagcctagcatctgaggactctgcggtctatttctgtgcaagacgggagactacgacggtaggccgttattactatgctatggactactggggtcaaggaacctcagtcaccgtctcctcgagcgagcccaaatcttctgacaaaactcacacaagcccaccgagcccatgcccaccgtgcccagcacctgaagccgcgggtgcaccgtcagtcttcctcttccccccaaaacccaaggacaccctcatgatctcccggacccctgaggtcacatgcgtggtggtggacgtgagccacgaagaccctgaggtcaagttcaactggtacgtggacggcgtggaggtgcataatgccaagacaaagccgcgggaggagcagtacaacagcacgtaccgtgtggtcagcgtcctcaccgtcctgcaccaggactggctgaatggcaaggcgtacgcgtgcgcggtctccaacaaagccctcccagcccccatcgagaaaaccatctccaaagccaaagggcagccccgagaaccacaggtgtacaccctgcccccatcccgggatgagctgaccaagaaccaggtcagcctgacctgcctggtcaaaggcttctatccaagcgacatcgccgtggagtgggagagcaatgggcagccggagaacaactacaagaccacgcctcccgtgctggactccgacggctccttcttcctctacagcaagctcaccgtggacaagagcaggtggcagcaggggaacgtcttctcatgctccgtgatgcatgaggctctgcacaaccactacacgcagaagagcctctccctgtctccgggtaaatctagaactgtggctgcaccatctgtcttcatcttcccgccatctgatgagcagttgaaatctggaactgcctctgttgtgtgcctgctgaattacttctatcccagagaggccaaagtacagtggaaggtggataacgccctccaatcgggtaactcccaggagagtgccacagagcaggacagcaaggacagcacctacagcctcagcagcgagctgacgctgagcaaagcagactacgagaaacacaaagtctacgcctgcgaagtcacccatcagggcctgagctcgcccgtcacaaagagcttcaacaggggagagtga

SEQ ID NO: 872 - DNA, 1851 bp, Artificial Sequence
  TSC163 (HD37 scFv-IgG3UH-CH2-CH3-Ck)
atggaagcaccagcgcagcttctcttcctcctgctactctggctcccagataccaccggtgacattgtgctgacccaatctccagcttctttggctgtgtctctagggcagagggccaccatctcctgcaaggccagccaaagtgttgattatgatggtgatagttatttgaactggtaccaacagattccaggacagccacccaaactcctcatctatgatgcatccaatctagtttctgggatcccacccaggtttagtggcagtgggtctgggacagacttcaccctcaacatccatcctgtggagaaggtggatgctgcaacctatcactgccagcaaagtactgaggatccgtggacgttcggtggaggcaccaagctggaaatcaaaggtggcggtggttcgggcggtggtgggtcgggtggcggcggagctagccaggttcagctgcagcagtctggggctgagctggtgaggcctgggtcctcagtgaagatttcctgcaaggcttctggctatgcattcagtagctactggatgaactgggtgaagcagaggcctggacagggtcttgagtggattggacagatttggcctggagatggtgatactaactacaatggaaagttcaagggtaaagccactctgactgcagacgaatcctccagcacagcctacatgcaactcagcagcctagcatctgaggactctgcggtctatttctgtgcaagacgggagactacgacggtaggccgttattactatgctatggactactggggtcaaggaacctcagtcaccgtctcctcgagcgagcccaaatctagcgacacacctcccccaagcccacggtccccatgcccaccgtgcccagcacctgaagccgcgggtgcaccgtcagtcttcctcttccccccaaaacccaaggacaccctcatgatctcccggacccctgaggtcacatgcgtggtggtggacgtgagccacgaagaccctgaggtcaagttcaactggtacgtggacggcgtggaggtgcataatgccaagacaaagccgcgggaggagcagtacaacagcacgtaccgtgtggtcagcgtcctcaccgtcctgcaccaggactggctgaatggcaaggcgtacgcgtgcgcggtctccaacaaagccctcccagcccccatcgagaaaaccatctccaaagccaaagggcagccccgagaaccacaggtgtacaccctgcccccatcccgggatgagctgaccaagaaccaggtcagcctgacctgcctggtcaaaggcttctatccaagcgacatcgccgtggagtgggagagcaatgggcagccggagaacaactacaagaccacgcctcccgtgctggactccgacggctccttcttcctctacagcaagctcaccgtggacaagagcaggtggcagcaggggaacgtcttctcatgctccgtgatgcatgaggctctgcacaaccactacacgcagaagagcctctccctgtctccgggtaaatctagaactgtggctgcaccatctgtcttcatcttcccgccatctgatgagcagttgaaatctggaactgcctctgttgtgtgcctgctgaattacttctatcccagagaggccaaagtacagtggaaggtggataacgccctccaatcgggtaactcccaggagagtgccacagagcaggacagcaaggacagcacctacagcctcagcagcgagctgacgctgagcaaagcagactacgagaaacacaaagtctacgcctgcgaagtcacccatcagggcctgagctcgcccgtcacaaagagcttcaacaggggagagtga

SEQ ID NO: 873 - DNA, 2139 bp, Artificial Sequence
  TSC164 (HD37 scFv-IgMCH2UH-CH2-CH3-Ck)
atggaagcaccagcgcagcttctcttcctcctgctactctggctcccagataccaccggtgacattgtgctgacccaatctccagcttctttggctgtgtctctagggcagagggccaccatctcctgcaaggccagccaaagtgttgattatgatggtgatagttatttgaactggtaccaacagattccaggacagccacccaaactcctcatctatgatgcatccaatctagtttctgggatcccacccaggtttagtggcagtgggtctgggacagacttcaccctcaacatccatcctgtggagaaggtggatgctgcaacctatcactgccagcaaagtactgaggatccgtggacgttcggtggaggcaccaagctggaaatcaaaggtggcggtggttcgggcggtggtgggtcgggtggcggcggagctagccaggttcagctgcagcagtctggggctgagctggtgaggcctgggtcctcagtgaagatttcctgcaaggcttctggctatgcattcagtagctactggatgaactgggtgaagcagaggcctggacagggtcttgagtggattggacagatttggcctggagatggtgatactaactacaatggaaagttcaagggtaaagccactctgactgcagacgaatcctccagcacagcctacatgcaactcagcagcctagcatctgaggactctgcggtctatttctgtgcaagacgggagactacgacggtaggccgttattactatgctatggactactggggtcaaggaacctcagtcaccgtctcctcgagcattgccgagctgcctcccaaagtgagcgtcttcgtcccaccccgcgacggcttcttcggcaacccccgcaagtccaagctcatctgccaggccacgggtttcagtccccggcagattcaggtgtcctggctgcgcgaggggaagcaggtggggtctggcgtcaccacggaccaggtgcaggctgaggccaaagagtctgggcccacgacctacaaggtgaccagcacactgaccatcaaagagagcgactggctcagccagagcatgttcacctgccgcgtggatcacaggggcctgaccttccagcagaatgcgtcctccatgagtgtcccctgcccaccgtgcccagcacctgaagccgcgggtgcaccgtcagtcttcctcttccccccaaaacccaaggacaccctcatgatctcccggacccctgaggtcacatgcgtggtggtggacgtgagccacgaagaccctgaggtcaagttcaactggtacgtggacggcgtggaggtgcataatgccaagacaaagccgcgggaggagcagtacaacagcacgtaccgtgtggtcagcgtcctcaccgtcctgcaccaggactggctgaatggcaaggcgtacgcgtgcgcggtctccaacaaagccctcccagcccccatcgagaaaaccatctccaaagccaaagggcagccccgagaaccacaggtgtacaccctgcccccatcccgggatgagctgaccaagaaccaggtcagcctgacctgcctggtcaaaggcttctatccaagcgacatcgccgtggagtgggagagcaatgggcagccggagaacaactacaagaccacgcctcccgtgctggactccgacggctccttcttcctctacagcaagctcaccgtggacaagagcaggtggcagcaggggaacgtcttctcatgctccgtgatgcatgaggctctgcacaaccactacacgcagaagagcctctccctgtctccgggtaaatctagaactgtggctgcaccatctgtcttcatcttcccgccatctgatgagcagttgaaatctggaactgcctctgttgtgtgcctgctgaattacttctatcccagagaggccaaagtacagtggaaggtggataacgccctccaatcgggtaactcccaggagagtgccacagagcaggacagcaaggacagcacctacagcctcagcagcgagctgacgctgagcaaagcagactacgagaaacacaaagtctacgcctgcgaagtcacccatcagggcctgagctcgcccgtcacaaagagcttcaacaggggagagtga

SEQ ID NO: 874 - protein, 579 aa, Artificial Sequence
  TSC125 (Cris7 scFv-CH2-CH3-CH1)
QVQLVQSGGGVVQPGRSLRLSCKASGYTFTRSTMHWVRQAPGKGLEWIGYINPSSAYTNYNQKFKDRFTISADKSKSTAFLQMDSLRPEDTGVYFCARPQVHYDYNGFPYWGQGTPVTVSSGGGGSGGGGSGGGGSAQDIQMTQSPSSLSASVGDRVTMTCSASSSVSYMNWYQQKPGKAPKRWIYDSSKLASGVPARFSGSGSGTDYTLTISSLQPEDFATYYCQQWSRNPPTFGGGTKLQITRSSEPKSSDKTHTCPPCPAPEAAGAPSVFLFPPKPKDTLMISRTPEVTCVVVDVSHEDPEVKFNWYVDGVEVHNAKTKPREEQYNSTYRVVSVLTVLHQDWLNGKAYACAVSNKALPAPIEKTISKAKGQPREPQVYTLPPSRDELTKNQVSLTCLVKGFYPSDIAVEWESNGQPENNYKTTPPVLDSDGSFFLYSKLTVDKSRWQQGNVFSCSVMHEALHNHYTQKSLSLSPGKSRASTKGPSVFPLAPSSKSTSGGTAALGCLVKDYFPEPVTVSWNSGALTSGVHTFPAVLQSSGLYSLSSVVTVPSSSLGTQTYICNVNHKPSNTKVDKKV

SEQ ID NO: 875 - protein, 574 aa, Artificial Sequence
  TSC157 (Cris7 scFv-IgA2UH-CH2-CH3-CH1)
QVQLVQSGGGVVQPGRSLRLSCKASGYTFTRSTMHWVRQAPGKGLEWIGYINPSSAYTNYNQKFKDRFTISADKSKSTAFLQMDSLRPEDTGVYFCARPQVHYDYNGFPYWGQGTPVTVSSGGGGSGGGGSGGGGSAQDIQMTQSPSSLSASVGDRVTMTCSASSSVSYMNWYQQKPGKAPKRWIYDSSKLASGVPARFSGSGSGTDYTLTISSLQPEDFATYYCQQWSRNPPTFGGGTKLQITRSSPPPPPCPPCPAPEAAGAPSVFLFPPKPKDTLMISRTPEVTCVVVDVSHEDPEVKFNWYVDGVEVHNAKTKPREEQYNSTYRVVSVLTVLHQDWLNGKAYACAVSNKALPAPIEKTISKAKGQPREPQVYTLPPSRDELTKNQVSLTCLVKGFYPSDIAVEWESNGQPENNYKTTPPVLDSDGSFFLYSKLTVDKSRWQQGNVFSCSVMHEALHNHYTQKSLSLSPGKSRASTKGPSVFPLAPSSKSTSGGTAALGCLVKDYFPEPVTVSWNSGALTSGVHTFPAVLQSSGLYSLSSVVTVPSSSLGTQTYICNVNHKPSNTKVDKKV

SEQ ID NO: 876 - protein, 584 aa, Artificial Sequence
  TSC158 (Cris7 scFv-IgG1miniUH-CH2-CH3-CH1)
QVQLVQSGGGVVQPGRSLRLSCKASGYTFTRSTMHWVRQAPGKGLEWIGYINPSSAYTNYNQKFKDRFTISADKSKSTAFLQMDSLRPEDTGVYFCARPQVHYDYNGFPYWGQGTPVTVSSGGGGSGGGGSGGGGSAQDIQMTQSPSSLSASVGDRVTMTCSASSSVSYMNWYQQKPGKAPKRWIYDSSKLASGVPARFSGSGSGTDYTLTISSLQPEDFATYYCQQWSRNPPTFGGGTKLQITRSSEPKSSDKTHTSPPSPCPPCPAPEAAGAPSVFLFPPKPKDTLMISRTPEVTCVVVDVSHEDPEVKFNWYVDGVEVHNAKTKPREEQYNSTYRVVSVLTVLHQDWLNGKAYACAVSNKALPAPIEKTISKAKGQPREPQVYTLPPSRDELTKNQVSLTCLVKGFYPSDIAVEWESNGQPENNYKTTPPVLDSDGSFFLYSKLTVDKSRWQQGNVFSCSVMHEALHNHYTQKSLSLSPGKSRASTKGPSVFPLAPSSKSTSGGTAALGCLVKDYFPEPVTVSWNSGALTSGVHTFPAVLQSSGLYSLSSVVTVPSSSLGTQTYICNVNHKPSNTKVDKKV

SEQ ID NO: 877 - protein, 584 aa, Artificial Sequence
  TSC159 (Cris7 scFv-IgG3UH-CH2-CH3-CH1)
QVQLVQSGGGVVQPGRSLRLSCKASGYTFTRSTMHWVRQAPGKGLEWIGYINPSSAYTNYNQKFKDRFTISADKSKSTAFLQMDSLRPEDTGVYFCARPQVHYDYNGFPYWGQGTPVTVSSGGGGSGGGGSGGGGSAQDIQMTQSPSSLSASVGDRVTMTCSASSSVSYMNWYQQKPGKAPKRWIYDSSKLASGVPARFSGSGSGTDYTLTISSLQPEDFATYYCQQWSRNPPTFGGGTKLQITRSSEPKSSDTPPPSPRSPCPPCPAPEAAGAPSVFLFPPKPKDTLMISRTPEVTCVVVDVSHEDPEVKFNWYVDGVEVHNAKTKPREEQYNSTYRVVSVLTVLHQDWLNGKAYACAVSNKALPAPIEKTISKAKGQPREPQVYTLPPSRDELTKNQVSLTCLVKGFYPSDIAVEWESNGQPENNYKTTPPVLDSDGSFFLYSKLTVDKSRWQQGNVFSCSVMHEALHNHYTQKSLSLSPGKSRASTKGPSVFPLAPSSKSTSGGTAALGCLVKDYFPEPVTVSWNSGALTSGVHTFPAVLQSSGLYSLSSVVTVPSSSLGTQTYICNVNHKPSNTKVDKKV

SEQ ID NO: 878 - protein, 680 aa, Artificial Sequence
  TSC160 (Cris7 scFv-IgMCH2UH-CH2-CH3-CH1)
QVQLVQSGGGVVQPGRSLRLSCKASGYTFTRSTMHWVRQAPGKGLEWIGYINPSSAYTNYNQKFKDRFTISADKSKSTAFLQMDSLRPEDTGVYFCARPQVHYDYNGFPYWGQGTPVTVSSGGGGSGGGGSGGGGSAQDIQMTQSPSSLSASVGDRVTMTCSASSSVSYMNWYQQKPGKAPKRWIYDSSKLASGVPARFSGSGSGTDYTLTISSLQPEDFATYYCQQWSRNPPTFGGGTKLQITRSSIAELPPKVSVFVPPRDGFFGNPRKSKLICQATGFSPRQIQVSWLREGKQVGSGVTTDQVQAEAKESGPTTYKVTSTLTIKESDWLSQSMFTCRVDHRGLTFQQNASSMSVPCPPCPAPEAAGAPSVFLFPPKPKDTLMISRTPEVTCVVVDVSHEDPEVKFNWYVDGVEVHNAKTKPREEQYNSTYRVVSVLTVLHQDWLNGKAYACAVSNKALPAPIEKTISKAKGQPREPQVYTLPPSRDELTKNQVSLTCLVKGFYPSDIAVEWESNGQPENNYKTTPPVLDSDGSFFLYSKLTVDKSRWQQGNVFSCSVMHEALHNHYTQKSLSLSPGKSRASTKGPSVFPLAPSSKSTSGGTAALGCLVKDYFPEPVTVSWNSGALTSGVHTFPAVLQSSGLYSLSSVVTVPSSSLGTQTYICNVNHKPSNTKVDKKV

SEQ ID NO: 879 - protein, 586 aa, Artificial Sequence
  TSC161 (HD37 scFv-IgA2UH-CH2-CH3-Ck)
DIVLTQSPASLAVSLGQRATISCKASQSVDYDGDSYLNWYQQIPGQPPKLLIYDASNLVSGIPPRFSGSGSGTDFTLNIHPVEKVDAATYHCQQSTEDPWTFGGGTKLEIKGGGGSGGGGSGGGGASQVQLQQSGAELVRPGSSVKISCKASGYAFSSYWMNWVKQRPGQGLEWIGQIWPGDGDTNYNGKFKGKATLTADESSSTAYMQLSSLASEDSAVYFCARRETTTVGRYYYAMDYWGQGTSVTVSSSPPPPPCPPCPAPEAAGAPSVFLFPPKPKDTLMISRTPEVTCVVVDVSHEDPEVKFNWYVDGVEVHNAKTKPREEQYNSTYRVVSVLTVLHQDWLNGKAYACAVSNKALPAPIEKTISKAKGQPREPQVYTLPPSRDELTKNQVSLTCLVKGFYPSDIAVEWESNGQPENNYKTTPPVLDSDGSFFLYSKLTVDKSRWQQGNVFSCSVMHEALHNHYTQKSLSLSPGKSRTVAAPSVFIFPPSDEQLKSGTASVVCLLNYFYPREAKVQWKVDNALQSGNSQESATEQDSKDSTYSLSSELTLSKADYEKHKVYACEVTHQGLSSPVTKSFNRGE

SEQ ID NO: 880 - protein, 596 aa, Artificial Sequence
  TSC162 (HD37 scFv-IgG1miniUH-CH2-CH3-Ck)
DIVLTQSPASLAVSLGQRATISCKASQSVDYDGDSYLNWYQQIPGQPPKLLIYDASNLVSGIPPRFSGSGSGTDFTLNIHPVEKVDAATYHCQQSTEDPWTFGGGTKLEIKGGGGSGGGGSGGGGASQVQLQQSGAELVRPGSSVKISCKASGYAFSSYWMNWVKQRPGQGLEWIGQIWPGDGDTNYNGKFKGKATLTADESSSTAYMQLSSLASEDSAVYFCARRETTTVGRYYYAMDYWGQGTSVTVSSSEPKSSDKTHTSPPSPCPPCPAPEAAGAPSVFLFPPKPKDTLMISRTPEVTCVVVDVSHEDPEVKFNWYVDGVEVHNAKTKPREEQYNSTYRVVSVLTVLHQDWLNGKAYACAVSNKALPAPIEKTISKAKGQPREPQVYTLPPSRDELTKNQVSLTCLVKGFYPSDIAVEWESNGQPENNYKTTPPVLDSDGSFFLYSKLTVDKSRWQQGNVFSCSVMHEALHNHYTQKSLSLSPGKSRTVAAPSVFIFPPSDEQLKSGTASVVCLLNYFYPREAKVQWKVDNALQSGNSQESATEQDSKDSTYSLSSELTLSKADYEKHKVYACEVTHQGLSSPVTKSFNRGE

SEQ ID NO: 881 - protein, 596 aa, Artificial Sequence
  TSC163 (HD37 scFv-IgG3UH-CH2-CH3-Ck)
DIVLTQSPASLAVSLGQRATISCKASQSVDYDGDSYLNWYQQIPGQPPKLLIYDASNLVSGIPPRFSGSGSGTDFTLNIHPVEKVDAATYHCQQSTEDPWTFGGGTKLEIKGGGGSGGGGSGGGGASQVQLQQSGAELVRPGSSVKISCKASGYAFSSYWMNWVKQRPGQGLEWIGQIWPGDGDTNYNGKFKGKATLTADESSSTAYMQLSSLASEDSAVYFCARRETTTVGRYYYAMDYWGQGTSVTVSSSEPKSSDTPPPSPRSPCPPCPAPEAAGAPSVFLFPPKPKDTLMISRTPEVTCVVVDVSHEDPEVKFNWYVDGVEVHNAKTKPREEQYNSTYRVVSVLTVLHQDWLNGKAYACAVSNKALPAPIEKTISKAKGQPREPQVYTLPPSRDELTKNQVSLTCLVKGFYPSDIAVEWESNGQPENNYKTTPPVLDSDGSFFLYSKLTVDKSRWQQGNVFSCSVMHEALHNHYTQKSLSLSPGKSRTVAAPSVFIFPPSDEQLKSGTASVVCLLNYFYPREAKVQWKVDNALQSGNSQESATEQDSKDSTYSLSSELTLSKADYEKHKVYACEVTHQGLSSPVTKSFNRGE

SEQ ID NO: 882 - protein, 692 aa, Artificial Sequence
  TSC164 (HD37 scFv-IgMCH2UH-CH2-CH3-Ck)
DIVLTQSPASLAVSLGQRATISCKASQSVDYDGDSYLNWYQQIPGQPPKLLIYDASNLVSGIPPRFSGSGSGTDFTLNIHPVEKVDAATYHCQQSTEDPWTFGGGTKLEIKGGGGSGGGGSGGGGASQVQLQQSGAELVRPGSSVKISCKASGYAFSSYWMNWVKQRPGQGLEWIGQIWPGDGDTNYNGKFKGKATLTADESSSTAYMQLSSLASEDSAVYFCARRETTTVGRYYYAMDYWGQGTSVTVSSSIAELPPKVSVFVPPRDGFFGNPRKSKLICQATGFSPRQIQVSWLREGKQVGSGVTTDQVQAEAKESGPTTYKVTSTLTIKESDWLSQSMFTCRVDHRGLTFQQNASSMSVPCPPCPAPEAAGAPSVFLFPPKPKDTLMISRTPEVTCVVVDVSHEDPEVKFNWYVDGVEVHNAKTKPREEQYNSTYRVVSVLTVLHQDWLNGKAYACAVSNKALPAPIEKTISKAKGQPREPQVYTLPPSRDELTKNQVSLTCLVKGFYPSDIAVEWESNGQPENNYKTTPPVLDSDGSFFLYSKLTVDKSRWQQGNVFSCSVMHEALHNHYTQKSLSLSPGKSRTVAAPSVFIFPPSDEQLKSGTASVVCLLNYFYPREAKVQWKVDNALQSGNSQESATEQDSKDSTYSLSSELTLSKADYEKHKVYACEVTHQGLSSPVTKSFNRGE

1. A polypeptide heterodimer, comprising:
(a) a first single chain polypeptide (SCP-I) comprising from one to four binding domains that specifically bind from one to four targets, a hinge (H-I), an immunoglobulin heterodimerization domain (HD-I), and an Fc region portion (FRP-I); and
(b) a second single chain polypeptide (SCP-II) comprising from zero to four binding domains that specifically bind from zero to four targets, a hinge (H-II), an immunoglobulin heterodimerization domain (HD-II), and an Fc region portion (FRP-II);
wherein
(i) the immunoglobulin heterodimerization domain of the first single chain polypeptide (HD-I) and the immunoglobulin heterodimerization domain of the second single chain polypeptide (HD-II) preferentially associate with each other to form a polypeptide heterodimer comprised of the first single chain polypeptide (SCP-I) and the second single chain polypeptide (SCP-II), and
(1) the immunoglobulin heterodimerization domain of the first single chain polypeptide (HD-I) comprises a first immunoglobulin CHI region, and the immunoglobulin heterodimerization domain of the second single chain polypeptide (HD-II) comprises a first immunoglobulin CL region, or
(2) the immunoglobulin heterodimerization domain of the first single chain polypeptide (HD-I) comprises a first immunoglobulin CL region, and the immunoglobulin heterodimerization domain of the second single chain polypeptide (HD-II) comprises a first immunoglobulin CHI region; and
(ii) the Fc region portion of the first single chain polypeptide (FCP-I) and the Fc region portion of the second single chain polypeptide (FCP-II) each comprise an immunoglobulin CH2 and CH3 domain of IgG1, IgG2, IgG3, IgG4, IgA1, IgA2, IgD, or any combination thereof; an immunoglobulin CH3 domain of IgG1, IgG2, IgG3, IgG4, IgA1, IgA2, IgD, IgE, IgM, or any combination thereof; or an immunoglobulin CH3 and CH4 domain of IgE, IgM, or a combination thereof,
provided that the polypeptide heterodimer comprises at least two binding domains that specifically bind at least two different targets.

2. The polypeptide heterodimer of claim 1, wherein the binding domains are single chain Fv (scFv) polypeptides.

3. The polypeptide heterodimer of claim 1, wherein the polypeptide heterodimer comprises two binding domains (BD1 and BD2), three binding domains (BD1, BD2 and BD3), four binding domains (BD1, BD2, BD3 and BD4), or five to eight binding domains.

4-15. (canceled)

16. The polypeptide heterodimer of claim 1, wherein at least one of the binding domains is an agonist of IL-10, HLA-G, HGF, IL-35, PD-1, BTLA, TNFR1, TNFR2, DR4, DR5, TWEAKR, or FAS.

17. The polypeptide heterodimer of claim 1, wherein at least one binding domain specifically binds a TCR complex or a component thereof, and at least another binding domain specifically binds to PSMA, CD79b, CD19, HLA-DR, CD20, RON, c-Met, or CEACAM-6.

18. The polypeptide heterodimer of claim 1, wherein at least one binding domain specifically binds to CD28, and at least another binding domain specifically binds to or is an antagonist of, CD79b, hyperIL-6, PDL2, monoIL-10, CD86, LIGHT, GITRL, CD40, PDL1, HVEM, or LTBR.

19. The polypeptide heterodimer of claim 1, wherein at least one binding domain specifically binds to CD28, and at least another binding domain is an agonist of IL-10, HLA-G, HGF, IL-35, PD-1, or BTLA.

20. The polypeptide heterodimer of claim 1, wherein the immunoglobulin heterodimerization domain of the first single chain polypeptide (HD-I) comprises the first immunoglobulin CHI region and the immunoglobulin heterodimerization domain of the second single chain polypeptide (HD-II) comprises the first immunoglobulin CL region.

21. (canceled)

22. (canceled)

23. The polypeptide heterodimer of claim 20 wherein the first single chain polypeptide further comprises a second CHI region and the second single chain polypeptide further comprises a second CL region, and wherein the second CHI region of the first single chain polypeptide and the second CL region of the second single chain polypeptide associate with each other in the polypeptide heterodimer.

24-26. (canceled)

27. The polypeptide heterodimer of claim 1, wherein the immunoglobulin heterodimerization domain of the first single chain polypeptide (HD-I) comprises a first immunoglobulin CL region, and the immunoglobulin heterodimerization domain of the second single chain polypeptide (HD-II) comprises a first immunoglobulin CHI region.

28. (canceled)

29. (canceled)

30. The polypeptide heterodimer of claim 27 wherein the first single chain polypeptide further comprises a second CL region and the second single chain polypeptide further comprises a second CHI region, and wherein the second CL region of the first single chain polypeptide and the second CHI region of the second single chain polypeptide associate with each other in the polypeptide heterodimer.

31-40. (canceled)

41. The polypeptide heterodimer of claim 1, wherein the first CL region is a Cκ region or a Cλ region.

42. (canceled)

43. The polypeptide heterodimer of claim 23, wherein the second CL region is a Cκ region or a Cλ region.

44. (canceled)

45. The polypeptide heterodimer of claim 41, wherein the Cκ region is a wild type human immunoglobulin Cκ region.

46. The polypeptide heterodimer of claim 41, wherein the Cκ region is an altered human immunoglobulin Cκ region with one or more amino acids of a wild type human Cκ region substituted at N29, N30, Q52, V55, T56, S68, or T70.

47. (canceled)

48. The polypeptide heterodimer of claim 41, wherein the CHI region is an altered human immunoglobulin CHI region comprising an amino acid substitution by which Val (V) at position 68 is substituted by Lys (K), Arg (R) or His (H), and wherein the Cκ region is an altered human immunoglobulin Cκ region comprising an amino acid substitution by which Leu (L) at position 27 is substituted by Asp (D) or Glu (E).

49. The polypeptide heterodimer of claim 41, wherein the CHI region is an altered human immunoglobulin CHI region comprising an amino acid substitution by which Val (V) at position 68 is changed to Asp (D) or Glu (E), and wherein the Cκ region is an altered human immunoglobulin Cκ region comprising an amino acid substitution by which Leu (L) at position 27 is changed to Lys (K), Arg (R) or His (H).

50-52. (canceled)

53. The polypeptide heterodimer of claim 1, wherein the first CHI region is an altered human immunoglobulin CHI region with the cysteine of a wild type human immunoglobulin CHI region that is involved in forming a disulfide bond with a wild type human immunoglobulin CL region deleted or substituted.

54-56. (canceled)

57. The polypeptide heterodimer of claim 53, wherein the first CHI region is a polypeptide comprising SEQ ID NO: 114, 844 or 845.

58. The polypeptide heterodimer of claim 41, wherein the Cκ region is selected from any one of the polypeptides comprising SEQ IL NOS: 141-178, 202, and 838-843.

59. The polypeptide heterodimer of claim 41, wherein the Cλ region is a polypeptide comprising SEQ ID NO: 140.

60. The polypeptide heterodimer of claim 1, wherein the Fc region portion of the first single chain polypeptide (FRP-I) and the Fc region portion of the second single chain polypeptide (FRP-II) each comprise an immunoglobulin CH2 domain of an immunoglobulin CH3 domain.

61-65. (canceled)

66. The polypeptide heterodimer of claim 1, wherein the Fc region portion of the first single chain polypeptide (FRP-I) and the Fc region portion of the second single chain polypeptide (FRP-II) each comprise an immunoglobulin CH2 domain and an immunoglobulin CH3 domain.

67-74. (canceled)

75. The polypeptide heterodimer of claim 1, wherein the hinge of both the first and second single chain polypeptides is an immunoglobulin hinge region.

76-78. (canceled)

79. The polypeptide heterodimer of claim 75, wherein the hinge region is
(a) amino terminal to the Fc region portion,
(b) disposed between the binding domain and the immunoglobulin heterodimerization domain,
(c) disposed between the immunoglobulin heterodimerization domain and the Fc region portion, or
(d) at the amino terminus of the first or second single chain polypeptide.

80-83. (canceled)

84. The polypeptide heterodimer of claim 1, wherein the hinges of the first and second single chain polypeptides are different.

85-87. (canceled)

88. The heterodimer of claim 1, wherein the first and second single chain polypeptides comprise SEQ ID NOS: SEQ ID NOS:2 and 4, SEQ ID NOS:6 and 8, SEQ ID NOS: 10 and 12, SEQ ID NOS: 14 and 16, SEQ ID NOS: 18 and 20, SEQ ID NOS:20 and 22, SEQ ID NOS:20 and 24, SEQ ID NOS:30 and 32, SEQ ID NOS:29 and 31, SEQ ID NOS:29 and 32, SEQ ID NOS:30 and 72, SEQ ID NOS:53 and 72, SEQ ID NOS:54 and 72, SEQ ID NOS:55 and 72, SEQ ID NOS:70 and 72, SEQ ID NOS:71 and 72, SEQ ID NOS:63 and 56, SEQ ID NOS:64 and 57, SEQ ID NOS:65 and 60, SEQ ID NOS:66 and 58, SEQ ID NOS:67 and 59, SEQ ID NOS:68 and 61, SEQ ID NOS:69 and 62, SEQ ID NOS:54 and 811, SEQ ID NOS:54 and 812, SEQ ID NOS:54 and 813, SEQ ID NOS:814 and 818, SEQ ID NOS:815 and 818, SEQ ID NOS:816 and 818, SEQ ID NOS:817 and 818, SEQ ID NOS:814 and 820, SEQ ID NOS:814 and 821, SEQ ID NOS:54 and 819, SEQ ID NOS:814 and 826, SEQ ID NOS:814 and 822, SEQ ID NOS: 814 and 823, SEQ ID NOS:814 and 824, SEQ ID NOS:859 and 862, SEQ ID NOS:860 and 863, SEQ ID NOS:861 and 864, SEQ ID NOS:874 and 825, SEQ ID NOS:875 and 879, SEQ ID NOS:876 and 880, SEQ ID NO:877 and 881, or SEQ ID NOS:878 and 882.

89. A composition comprising a polypeptide heterodimer of claim 1 and a pharmaceutically acceptable excipient.

90. An expression vector capable of expressing the polypeptide heterodimer of claim 1, comprising a first polynucleotide encoding the first single chain polypeptide and a second polynucleotide encoding the second single chain polypeptide.

91. A host cell comprising the expression vector of claim 90.

92. A host cell comprising first and second expression vectors capable of expressing the first and second single chain polypeptides, respectively, of the polypeptide heterodimer of claim 1.

93. A method for making a polypeptide heterodimer, comprising
(a) culturing the host cell of claim 91 under conditions suitable to express first and second single chain polypeptides, and
(b) optionally isolating or purifying the heterodimers formed from the first and second single chain polypeptides from the culture.

94. A method for directing T cell activation, comprising administering to a patient in need thereof an effective amount of a polypeptide heterodimer according to claim 1, wherein the polypeptide heterodimer comprises a binding domain that specifically binds TCRα, TCRβ, CD3γ, CD3ε, CD3β or a combination thereof, and a second binding domain that specifically binds a different target.

95. A method for inhibiting growth, metastasis or metastatic growth of a malignancy, comprising administering to a patient in need thereof an effective amount of a polypeptide heterodimer according to claim 1, wherein the polypeptide heterodimer comprises a binding domain that specifically binds TCRα, TCRβ, CD3γ, CD3ε, CD3ε, c-Met, or Ron.

96. A method for treating an autoimmune or inflammatory condition, comprising administering to a patient in need thereof an effective amount of a polypeptide heterodimer according to claim 1, wherein the polypeptide heterodimer comprises a binding domain that specifically binds TCRα, TCRβ, CD3γ, CD3ε, CDR or CD28.

97. A method for treating a B-cell associated disorder or disease comprising administering to a patient in need thereof an effective amount of a polypeptide heterodimer according to claim 1, wherein the polypeptide heterodimer comprises a binding domain that specifically binds TCRα, TCRβ, CD3γ, CD3ε, CD3β, and a second binding domain that specifically binds to CD19, CD20, CD79b or HLA-DR.

98-101. (canceled)
